United States Patent Application Publication US 2003/0078396 A1 - sequence listing, part 2

SEQ ID NO: 8170 - DNA, 359 bp, Homo sapiens
  unsure (145): n=A,T,C or G
ggcgaggcaggggagctgccttcggtacataatttgaaggggcactccctcttgggcacatgccggccctgagtgcctcccttgcctcactctgatcccggccccataatgtcctcagtggaaggtgactgggggccggtgctgnggggagagtagaaagaggggttggcatgactaaaaataccagtatgtgtattaagtattttgagaatgaaatgccaaggagtgcctactgtatgccagctctgctctaggaatggagtagacagtggacacaagaaggacttacgccctgagcacaggtgccaacggtgacaagactggcaagacgtgagggcatgaatggttcattcaggcag

SEQ ID NO: 8171 - DNA, 420 bp, Homo sapiens
ctgttagatgaaaatctaaaggatgaatactttgaggaaatcatggaagaatatgaagatattagacagggccattatgagtctctcaaggagaggagatacttacccttaagtcaagccagaaaaagtggtttccaaatggattggctgtctgaacctcacccagtgaagcccacgtttattgggacccaggtctttgaagactatgacctgcagaagctggtggactacattgactggaagcctttctttgatgtctggcagctccggggcaagtacccgaatcgaggctttcccaagatatttaacgacaaaacagtaggtggagaggccaggaaggtctacgatgatgcccacaatatgctgaacacactgattagtcaaaagaaactccgggcccggggtgtggttgggttctgg

SEQ ID NO: 8172 - DNA, 640 bp, Homo sapiens
ctgacattcctgaataagaaggaagcaattgctgcagtcatccaggcaacagctatggtgccatgagtgaggaggaagcagcagagggagtcggattctggcggaggggggagtcccatgaggaaggatttacaggatgagaagtatgagaggaacacaggaattagcttattacaatacaaaaactccaacaaatatgaaagaggcaatcactaaagcagtttcagaaaaatatgctaccaaagggagaaaaggcaaagtagctgagattttcagacaatggctttagtacaaaagagaagcaaggggactatacatgtcatttcactaggttgacttttcattattgttgttgttcttaaaaccttgatctttatttttttcttaagtcgaaagctaagaatctacaaagaattatctataattggttttctctactcatgtgaattcgaaagaagccttccaaaaacgtatattgtaaattgagttgcacgaaaaaaaaaaactcattttagaatcttcttttttattaaaccaaataggcactgctggctgcttgtctcacaattctgctacacatagcagtgaggctcctgacttttacaatattccctgggactattggttgagttacccatga

SEQ ID NO: 8173 - DNA, 323 bp, Homo sapiens
  unsure (33): n=A,T,C or G
  unsure (62): n=A,T,C or G
  unsure (70): n=A,T,C or G
  unsure (75): n=A,T,C or G
  unsure (103): n=A,T,C or G
  unsure (117): n=A,T,C or G
  unsure (127): n=A,T,C or G
  unsure (178): n=A,T,C or G
  unsure (197): n=A,T,C or G
  unsure (200): n=A,T,C or G
  unsure (212): n=A,T,C or G
  unsure (254): n=A,T,C or G
  unsure (264): n=A,T,C or G
  unsure (300): n=A,T,C or G
  unsure (308): n=A,T,C or G
  unsure (317): n=A,T,C or G
  unsure (320): n=A,T,C or G
acaagcttttttttttttttttttttttttttngctattttaatattttttattaagggctntaaaaatncccanaaagataaataaatgtgatgcaatgatntctgtcctaatatnaaaaactttntttcactgcattgttttccttcacaatggccttcaaatcacaggaggcagngattccatgccatttcctnttnttttattacacnctacaggatttctgaatcagtatccccgccctcagtcttctntttataaatnaaagtcattttcaatccaccgtttaaagggagcgtntttttttnttttccacnaanagg

SEQ ID NO: 8174 - DNA, 309 bp, Homo sapiens
tcgacagcccagtagaggaaaaaggggtggtgccgtgcctgtctcttaatgaagtccagggcttcctgcaggtagatctgggtgaggttggcttcccccgtcttcagattaataggaaattcttcataatatctgccaaccatctcccagtccctgtacacagggatgttgggcctggccttgttgtcataaggtccaaagtggcagttgggggatccaaaccactcatcaaatccgtgcttcagggggtggaactggggcctgtgacccagatgcctctgtgcccactcgccctggcccccaggccag

SEQ ID NO: 8175 - DNA, 568 bp, Homo sapiens
gaagaagatgggcatcaaggcttcaaacacagcagaggtgttctttgatggagtacgggtgccatcggagaacgtgctgggtgaggttgggagtggcttcaaggttgccatgcacatcctcaacaatggaaggtttggcatggctgcggccctggcaggtaccatgagaggcatcattgctaaggcggtagatcatgccactaatcgtacccagtttggggagaaaattcacaactttgggctgatccaggagaagctggcacggatggttatgctgcagtatgtaactgagtccatggcttacatggtgagtgctaacatggaccagggagccacggacttccagatagaggccgccatcagcaaaatctttggctcggaggcagcctggaaggtgacagatgaatgcatccaaatcatggggggtatgggcttcatgaaggaacctggagtagagcgtgtgctccgagatcttcgcatcttccggatctttgaggggacaaatgacattcttcggctgtttgtggctctgcagggctgtatggacaaaggaaaggagctctctggg

SEQ ID NO: 8176 - DNA, 554 bp, Homo sapiens
  unsure (522): n=A,T,C or G
ccatttacaaatatgtttaatagcagcatttctttaaagaaaaacaaagttcaaatgcccaataataattatgtttaacacttggtacacatataaatagacaaaaggctgcggagaacactggatttaaataaaggtgttatgggtataattaactataatttattttatgaataaataagaaaaaagtccctggctataaaggatagtggaggtttatttcccaatattcttccatttggactgaacccctgccaactaagcagacatcccactattacaccaaaaagactgctctccccgcgagcaattacaatacatgacaccactaggcccaatggctcagagggaagagtggcctgtggctcttcaatctttatccaaacctggttctagcttcaggagcctttggtcacctgagactttttatttattaatttttatgagacggagtattgctatgttgcccaggctgattctgaactcctgggctcaagcagttctcccgcctgggcctcccanaatgttgggattacaggcatgagccaccacac

SEQ ID NO: 8177 - DNA, 262 bp, Homo sapiens
cctcaagtaatccatctacctcggcctcccaaaggattgggactactgatgtgaggtgtatttgtcactattcatctaactgcatacacattatctgtgcacttactgtatataaattatacctcaataaaaagtttatttacttctttatattaaatgtctattaataagctgggcgcagtggctcacacctgtaatcctagcactttgggaggccatggcgggcagatcacttggggccagaagtttgagaccagcctgg

SEQ ID NO: 8178 - DNA, 569 bp, Homo sapiens
  unsure (208): n=A,T,C or G
  unsure (466): n=A,T,C or G
cggctaactatggcgaccgccacggagcagtgggttctggtggagatggtacaggcgctttacgaggctcctgcttaccatcttattttggaagggattctgatcctctggataatcagacttcttttctctaagacttacaaattacaagaacgatctgatcttacagtcaaggaaaaagaagaactgattgaagagtggcaaccanaacctcttgttcctcctgtcccaaaagaccatcctgctctcaactacaacatcgtttcaggccctccaagccacaaaactgtggtgaatggaaaagaatgtataaacttcgcctcatttaattttcttggattgttggataaccctagggttaaggcagcagctttagcatctctaaagaagtatggcgtggggacttgtggacccagaggattttatggcacatttgatgttcatttggatttggaagaccgcctgncaaaatttatgaagacagaagaagccattatatactcatatggatttgccaccatagccagtgctattcctgcttactctaaaagaggggacattgtttttgt

SEQ ID NO: 8179 - DNA, 241 bp, Homo sapiens
ctgtgatattgtgaaatatatagttggtcttcaactcccttcctggcatacaactcctaaaatctttggcctttccaaagtggtgtcattttgtatgctaatgattggtggctggcgcacttaggtagcttcagggtaggggctggtcactgaaaaaccaagggaggattagaaggttaggactttctgtcccatctcccaacctccaaggagggcagagaggctgactgatttccaatgg

SEQ ID NO: 8180 - DNA, 175 bp, Homo sapiens
ccagtgatggactgctgggaaatctgctggcctgtggtctgagttcccctacttgctcaggctgcccctcactcccagtgtgccagggaggcttagtccggggagcatcagagcagaagacattcggggctcatggctcccatccccactggcctgtatcttcagcaccctctgg

SEQ ID NO: 8181 - DNA, 545 bp, Homo sapiens
ggaatttcgcagagctgaagatcaagcgcctgagaaagaagtttgcccaaaagatgcttcgaaaggcaaggaggaagcttatctatgaaaaagcaaagcactatcacaaggaatataggcagatgtacagaactgaaattcgaatggcgaggatggcaagaaaagctggcaacttctatgtacctgcagaacccaaattggcgtttgtcatcagaatcagaggtatcaatggagtgagcccaaaggttcgaaaggtgttgcagcttcttcgccttcgtcaaatcttcaatggaacctttgtgaagctcaacaaggcttcgattaacatgctgaggattgtagagccatatattgcatgggggtaccccaatctgaagtcagtaaatgaactaatctacaagcgtggttatggcaaaatcaataagaagcgaattgctttgacagataacgctttgattgctcgatctcttggtaaatacggcatcatctgcatggaggatttgattcatgagatctatactgttgggaaaacgcttcaaagaggc

SEQ ID NO: 8182 - DNA, 593 bp, Homo sapiens
ctgccaggagccagttgctctggcctcagtctccaattgttagtctcaggatcaacagagaactggaaagcagcagaatctggaggagcaggaagagagcccagagggagtgttgtgctgagtgacggttaacagatgaaacagaatttcatggagattctttgttacaaggagaaattgctcagtctcaactcccaaaacgtgaaagttgcctggtttaagagacctatgttttctttttcagctcttcaaacctccgggaaagatcatcaaagtcaatgtcttcagatgctgaggtgctggcaccagcagatgcagttggtagtgtgtctggcacagatggcaactctggtaggacaaagttgtcatagttatctgcaggtctggaaggaagctttgcagaggcttctggcttgggtccaggaccaacaatctgtgcagaagagatattcttatcagcattaatgtcatctacctgaaacacaaagattgttaccagaggagacagcaatagtgtcactggagaaagtactggtgtaagcccctgtgtttccaaaagttaagttgctcaccaaatgcaacagagcctgttc

SEQ ID NO: 8183 - DNA, 357 bp, Homo sapiens
ccacatcaatgtcatacagcttcttcacagcctgtttaatctggtgcttgttggctttaacatccacaatgaacacaagtgtgttgttgtcttctatcttcttcatggcagactcagtggtcagcggaaacttgatgatagcatagtggtcaagcttgtttctcctgggagcgctcttccgaggatatttgggctgtctccggagtcgcagtgtcttcggccgccggaaggtgggtgacgtgcggatcttcttctttttgtggctgtggacacctttcaacactgccttcttggcctttaaagccttcgctttggcttcagctttaggaggggcaggagcttccttcttcgctttcg

SEQ ID NO: 8184 - DNA, 595 bp, Homo sapiens
ccaatatgcctttggagcacagcctatggtttatgtttcttttatgaccacctttaatatctgtcaaacgactagacatgctatagctttacccgaaggtaatttgattgactgtgctctgctagaagatggtgtatgggtccctctcgaggtaactgccaataaatgataagtggtatttgttttagataatgcctctacctcagtggtagctttgataatggcaaattgtaattgcaagtgccattttcagaataggcattggtttattttaggaagaggataataaagttccttttagttatcaaagtaacaccttttattgttaaatctcaacttttgaagaaaacactttcaatttcttaactttttcctcagggttagtgagttagtacaactacccaaagaagtgttaaaatattgagattctatatgtgtgtgtttatatgtgcatctatgtattacgtatacaaaatatttcacctcaaaggactttttgaaaaggtaatctttggtctatagtacagtgttaagctcactgataatttagaatcattaagttcgtttattttcttaacactacagaaaggaaagg

SEQ ID NO: 8185 - DNA, 514 bp, Homo sapiens
  unsure (403): n=A,T,C or G
ccaggatggcatcagtggcaaacacattcccctgagtttttgccagcttgcggatgacagggtcgtctgtggtggtgacagtgtggaagatgcgcttgatgctccgcagtggcttctcactcctcgtggtgatgcggtcaaaggctttgtcgtagtattctagggccccacaacactcaatgtcctgtggctctgatacttccaagtagcgcatcttcatcaactgaggaaaatccatttcctctttcacttcccaatcactacgaacttcaactgaagagtctcggggtttctgtgatttctgatcccatttctgcctaaccccaaattgtttctggaactttttctgcagtcgaatgcgttctctctctttctgtttggcactcttaggcaggatctgcangttgaactgcaacatgttccgacgatctttgtctctgcggaggttcctctgggcaaatctcattcgattccgctggtaggccgtcttctgtgtgcgcgctgtatccaccag

SEQ ID NO: 8186 - DNA, 601 bp, Homo sapiens
  unsure (593): n=A,T,C or G
gttatttccaccatctggttttccaatgctagtcactgacatcaagccaagactgagaaaatttgcccacatctctggaggtacaaccaccccatatttgggtcagtcctgatctctgatgccttcttcccctttctccactgacctttcagagaggttaaatggatttgacagagaaagcatacagactgttcaaaaatggaagatcatctactaagattatatccatctctaagactttacatgtttatgatttcactaactatgcatcccaattttgtgaatatatttttaaagaaacatttatatctatatcaattactaaaagccaacatttattggagctctttaattgtattaaaatttattatccatgataatgcaatacaactgatactgtttttagtttaatatgtgtagttaacgaacctcagaggggttaacttgcctgctgtcacacaatggaaacctcaatttgaaagtttgccctaagccactaaactatgctacttatcccttcagcacatacatgacatccttatttactcatctaaaagttatggttagagttgagaggtagtgttataatccanaaagagca

SEQ ID NO: 8187 - DNA, 361 bp, Homo sapiens
ccaagcatctaagaatataatccagccaccctcctgtgttttgcattattataatgttccattgtgtgtcacagaagagaccttcacaaagttgtgtaatgaccatgaagttcttacattcatcaaatataaagtgtttgatgcaaaaccttcagccaaaacactttctgggctattagaatgggagtccaaaactgatgcagtagaagcccttacggcactgaatcactatcagataagagtgccgaatggttccaatccctatacattgaagctttgcttttctacatcatcccatttataagaagagaagagcatgttagaatttatgttcacctttattacaaatgggatgatgtag

SEQ ID NO: 8188 - DNA, 363 bp, Homo sapiens
cctggcatacccccatcctctacactcatacccacacaagaccctgggtggctaaggggcagcagggattgcaacacgtttggggaaaatcaagttatggagccagctcccaggaaggagaagccgtggaacattgccagagagaatactgaggatcagaggcatctaccaactccacagtcagggcttgaagagtaaggggctggtggtccttgaagccacagtcttggggcgagtcccatggagctaggaaggggaagaaggaatccagggtgcaggctgaggaactactgtccacaatctgcaggaagggaggcaaggatgaaggtggcaggaaagttggagatagcaaatggatgacag

SEQ ID NO: 8189 - DNA, 387 bp, Homo sapiens
ccatcggtgctgaaattgagcattttaaatagtacagtaggctggtatacattaggaaatggactgcactggaggcaaatagaaaactaaagaaattagataggctggaaatgcttactttctgctctcattttctttcattttgtctgctgtctttttgaatgccaatactttcatttaaaatgttttgggagcacggcaacccaaaatgactgaacggtggtccaaaaatccaaaccaactgataattacttctcgaggtgataggaaaggcacaggaagttaggactttggctgaaatgatgaaaacacatgttcgccattttagggatcagcgcctcgactcctgccacctccggctccaacgatgatcagcaaaggacaatt

SEQ ID NO: 8190 - DNA, 537 bp, Homo sapiens
  unsure (406): n=A,T,C or G
caaatagcaaaattgaggccaagggccaagagaatatccgaactttaatttcaggaattgaatgggtttgctagaatgtgatatttgaagcatcacataaaaatgatgggacaataaattttgccataaagtcaaatttagctggaaatcctggatttttttctgttaaatctggcaaccctagtctgctagccaggatccacaagtccttgttccactgtgccttggtttctcctttatttctaagtggaaaaagtattagccaccatcttacctcacagtgatgttgtgaggacatgtggaagcactttaagttttttcatcataacataaattattttcaagtgtaacttattaacctatttattatttatgtatttatttaagcatcaaatatttgtgcaangaatttggaaaaatagaagatgaatcattgattgaatagttataaagatgttatagtaaatttattttattttagatattaaatgatgttttattagataaatttcaatcagggtttttagattaaacaaa

SEQ ID NO: 8191 - DNA, 599 bp, Homo sapiens
ctgatcttaaactcctgacctcaagcagtctacccccgttggcctcccaaagtgctgggattacaggtgtgagccactgcacccagccaagtttatgtatttttattctttttcatgaatgtgatttgttaaatgagtgattaaatataatttttatatatttgtatgacttttctgtaaataaaatttaaaatcagaaaaaatcatgttagaccatgtatagtgatttattttgaaattttgattatttaatatgtacaccatgctctgttcttccccacaataaaaaaattcaatgctttgtcttctttaaaatataccatataaatagcatcagtaatagtaaatatcgaggaatgactctaataaaatatgtacagtacttctgcatggaattctataaaacattattgagagaaactaaagaagacccaaataattggagcattatataatgttcatgtattgaaagaatcaatattataaacatacatgttttctccaaatctatagatcccaatttaatcccaatcaaaatcttaataacagcattattaaaaataacattattgagatataattcacatatcttaaaattc

SEQ ID NO: 8192 - DNA, 301 bp, Homo sapiens
  unsure (265): n=A,T,C or G
atgtaaataagatgatttaatgttgattttaatcctgtatataaaataaaaagtcacaatgagtttgggcatatttaatgatgattatggagccttagaggtctttaatcattggttcggctgcttttatgtagtttaggctggaaatggtttcacttgctctttgactgtcagcaagactgaagatggcttttcctggacagctagaaaacacaaaatcttgtaggtcattgcacctatctcagccataggtgcagtttgcttnctacatgatgctaaaggctgcgaatgggatcctgat

SEQ ID NO: 8193 - DNA, 563 bp, Homo sapiens
ctggcaatgacaagactgggagtatcaaactaggattgttagttcaattaaaatttcagataaacaataatgtacttatactaaaaaattatttgttgtttatctgaaatgaaaatttaactgggtacccaattgtttgtttgtttaatctaaaaaccctgattgaaatttatctaataaaacatcatttaatatctaaaataaaataaatttactataacatctttataactattcaatcaatgattcatcttctatttttccaaattcttgcacaaatatttgatgcttaaataaatacataaataataaataggttaataagttacacttgaaaataatttatgttatgatgaaaaaacttaaagtgcttccacatgtcctcacaacatcactgtgaggtaagatggtggctaatactttttccacttagaaataaaggagaaaccaaggcacagtggaacaaggacttgtggatcctggctagcagactagggttgccagatttaacagaaaaaaatccaggatttccagctaaatttgactttatggcaaaatttatt

SEQ ID NO: 8194 - DNA, 571 bp, Homo sapiens
  unsure (545): n=A,T,C or G
gtttaacggccgcggtaccctaaccgtgcaaaggtagcataatcacttgttccttaattagggacctgtatgaatggctccacgagggttcagcctgtttgattgtagctatgttggtgtatctcgtgtacaagatggaaaagtgcttttgttgttctacctgatccagttgggggagcaggaatagggggtgcctgcctaacggcctctagcccatgtgcttatactgggatctgtcccgagggatctgcacctggttggcagtcattttgtggtggatgtggtaaatcgcgagtgttaccatgatgacgaggcccaagatgagccccaaaatcaggggcaaggtttcttccagttgctcccgctcatccactgggcatttatgctcttcactgaagacaaaatctgagataatgtcaaaaggttggatgtggaccgcagacaggatcatggtgaccgtcttctgcggatcactagaggccagtgaaatggtttgttgagcttgacactcataggacttcccagcgggggtgaccaaggcaganaggtggtgcgagttggctgtgtgctt

SEQ ID NO: 8195 - DNA, 511 bp, Homo sapiens
  unsure (18): n=A,T,C or G
  unsure (87): n=A,T,C or G
  unsure (161): n=A,T,C or G
  unsure (163): n=A,T,C or G
  unsure (204): n=A,T,C or G
  unsure (279): n=A,T,C or G
  unsure (280): n=A,T,C or G
  unsure (304): n=A,T,C or G
  unsure (347): n=A,T,C or G
  unsure (390): n=A,T,C or G
  unsure (464): n=A,T,C or G
atttcaagaacactgaanaatggaaagtgggcattaactgaagcagacacctcttgaggtaagatttgtggaagaagaggttaaagngtgccagaaatttgggttaccctcctctagaaagaaattccagtaatggatctgtttaagtgttaagggagcanangagaagacggtgaatgtacttcaatattttgaacatttttngaaataggaattcttgagtctcttttctttcttcagtcttttccatttctttttcttttctttttcactgtaatnntctgtgtttctgatactgtgctgntttagataatattatgtttacatctttcatcccactccttatnccttcaaaggtctgaggaaaaaaaacctgtcccctggtgcggnggaatcggatgtgagaggaataactggggttgatctatttggaactacagatgcagtggtgaagcatgtactanagggtcacgatcgtggagtaaactgggctgccttccaccccactatg

SEQ ID NO: 8196 - DNA, 563 bp, Homo sapiens
  unsure (520): n=A,T,C or G
ccagtggaatgatgttccctgcaattaccatctcacctatacgtgcaagaaaggaacagttgcttgcggccagccccctgttgtagaaaatgccaagacctttggaaagatgaaacctcgttatgaaatcaactccctgattagataccactgcaaagatggtttcattcaacgtcaccttccaactatccggtgcttaggaaatggaagatgggctatacctaaaattacctgcatgaaccgtaagtggtcctttagaaagaatggactaccgtgctataacaactactagacaccttcattttacggctgtggtatcggcagtttagggtatggagcaagtaatattgtgtgttttctttttttctttctttccttccatgtagcatctgcataccaaaggacttattctatgaaatactttaaaaattcctcatcagcaaaggacaattcaataaatacatccaaacatgatcatcgttggagccggaggtggcaggagtcgaggcgctgatccctnaaatggcgaacatgtgttttcatcatttcagccaaagtcctaa

SEQ ID NO: 8197 - DNA, 562 bp, Homo sapiens
  unsure (509): n=A,T,C or G
  unsure (553): n=A,T,C or G
  unsure (558): n=A,T,C or G
ccttcttgtgatcttgctctatctcacagcacactcagcacccccttctctgcccattccccagcctctcttcctatcccatcccatcccatcccatcccatcccatcccgctcttttcctacttttccttccctcaaagcttccattccacatccggaggagaagaaggaaatgaatttctctacagatgtcccattttcagactgctttaaaaaaaatccttctaatctgctatgcttgaatgccacgcggtacaaaggaaaaagtatcatggaaatattatgcaaattcccagatttgaagacaaaaatactctaattctaaccagagcaagcttttttattttttatacaggggaatattttattcaaggtaaaattctaaataaaatataattgttttttatcttttctacagcaaatttataattttaagattccttttcttgtttatcagcagttgttattacatccttgtggcacatttttttttttaattttgtaaaggngaaaaaagcttttatgagctcatgtagcaatcagattttcctgnggatngata

SEQ ID NO: 8198 - DNA, 547 bp, Homo sapiens
  unsure (341): n=A,T,C or G
  unsure (503): n=A,T,C or G
tttttttttggaaattggagataaaatttttattacttgtaaacaaaattctgtcaaaaacctgacaaattaaacaatacaattaatatgtttaatagaactaattacatatgagaggcatccaaaatccatttttctatacaaacatggtttgatatacagtcattttatctgtgtattaattggtttatgaaataacaaatagaaaaatcaagtatgcattatcaagttaaagaagcaggagagatggagctataaaaacaaagagagaagaatgttgtaaggagggcttaacaaccaggataaatgttgtagagagatcaattaaagtgatggcctanagatcacgggcttcctttggcagagccatgttggtgaagtgaaggaagtggaagccagaccacaatggttgaagaatgaatgtaatgtaagagccaagacatttatttgagtctgatagtaatgaaaaaggacaagaattttcttcttgctgttgtttttgncatttcatgttcaaaaccctttatctcccatgtggtactgaaaa

SEQ ID NO: 8199 - DNA, 592 bp, Homo sapiens
  unsure (110): n=A,T,C or G
  unsure (131): n=A,T,C or G
  unsure (153): n=A,T,C or G
  unsure (548): n=A,T,C or G
ggcagatagtgagcgctggtggcggagttaaagtcaaagcaggagagtaattatgaatagcgcagcgggattctcacacctagaccgtcgcgagcgggttctcaagttangggagagtttcgagaagcagncgcgctgcgccttccacactgngcgctatgacttcaaacctgcttctattgacacttcttctgaaggataccttgaggttggtgaaggtgaacaggtgaccataactctgccaaatatagaaggttcaactccaccagtaactgttttcaaaggttcaaaaaaaccttacttaaaagaatgcattttgattattaaccatgatactggagaatgtcggctagaaaaactcagcagcaacatcactgtaaaaaaaacaagagttgaaggaagcagtaaaattcagtatcgtaaagaacaacagcaacaacaaatgtggaattcagccaggactcccaatcttgtaaaacattctccatctgaagataagatgtccccagcatctccaatagatgatatcgaaagagaactgaaggcangaagctagtctaatggaccagatgagtagttgtgatagttcatc

SEQ ID NO: 8200 - DNA, 542 bp, Homo sapiens
ccaccttttaaacataagttaattacttgctgacataatatgaaaccttactttaaatacaatagtttcaaagaaaaatggtgttacaatataaaaccacaacaaaaggtgtgcaaagagacatttatattggctataaaaggcagtgagaggaaagggcaaagcagtttagaaaataattcctgcaatcactatttacagttctggtttgagctttgtttgaattccacttgaaaaaataactcccttcaaccaactgactcagggggatggatggaaaagaacagagtaggtgaaatttgcaacaaactgactctaagaaggctctcaccttagagatattaacttggatcaggcgcatctttctctgtgattgcatattgaaggagtgctgtctaaagcccttgatcctctgtctctcttccttcactcagtgcattggtgcagcaattttgtttattcccgtttccaaatgccacacccttctgtgagcagagaaatccatgactcaagaatggtatctttgtaaactccatcttttc

SEQ ID NO: 8201 - DNA, 589 bp, Homo sapiens
ccaaggcttccagggtctggtgcagggacgaagaggaacacagtgccccaaacactgggatgctctccactgctgctcccttgggggaaccatccagaaccatacccggtggactgcagcttgagaagaggtgggggtaaggaggagccaccctgcagggagtcagcagcagatgggaagaactcatgactccaggctgctgctgttgtaaatactgagccaagatttcttccccagtggtacatgcatgaagggcagagggtggaggtgtccctggggtgagctggcttgtgtggcatgctctgtctatacccctcagcaccactgactgggcaaagcaacgtgttccagaaggctccccacatgcagacagtggggtccatggggtggctcctccaaactgcatcagggaatcaggaagggactggcctggagccaaggggaaagggatgattgctcctgctgtcaccacctttttcccacagaagctcagcatgtcagccagatgaaccatggaaactggagaggaacacaggcgataaggaacagtgactgtgtccagggctgtagccaggatggcactgcagtg

SEQ ID NO: 8202 - DNA, 581 bp, Homo sapiens
  unsure (63): n=A,T,C or G
  unsure (65): n=A,T,C or G
  unsure (103): n=A,T,C or G
  unsure (149): n=A,T,C or G
  unsure (158): n=A,T,C or G
  unsure (239): n=A,T,C or G
  unsure (319): n=A,T,C or G
  unsure (326): n=A,T,C or G
  unsure (348): n=A,T,C or G
  unsure (367): n=A,T,C or G
  unsure (383): n=A,T,C or G
  unsure (413): n=A,T,C or G
  unsure (428): n=A,T,C or G
  unsure (433): n=A,T,C or G
  unsure (470): n=A,T,C or G
  unsure (501): n=A,T,C or G
  unsure (515): n=A,T,C or G
  unsure (540): n=A,T,C or G
  unsure (545): n=A,T,C or G
  unsure (561): n=A,T,C or G
  unsure (568): n=A,T,C or G
  unsure (576): n=A,T,C or G
gtacaagcttttttttttttttttttttttttttttttgggattatttactaaataattgatntncatccaacatcactgaatggaaataatttaaaaataancaaggcttaaattggggtctttcaaaaaactcaaaacattcttggngactgtatntttaacaaatggaatgacaaaactagttaagtcatattatctcaatcaactccaaaactcaatgttgccaacatgtttttntacttaaaagcaaacaaaaagcaaagcctcataatttagtaattaccatgtttcttggtttctgttctcaaatgccacanaaagatncctgatgaaaggaagcaaagcncctagtctcatcagtcttnttcaaaactttaaggntgctttcacaatctcactataaatatttanattcctatctgacanatttnttcacttatgtgagtaggaatgctctcgaaaccttantctttactcttgcttcatactaaagctgttngattaaaccacctntgtatttgctggcctgcaacactanataanaactcattcctatctnttccaanaaaccaanataat

SEQ ID NO: 8203 - DNA, 586 bp, Homo sapiens
  unsure (385): n=A,T,C or G
  unsure (466): n=A,T,C or G
  unsure (553): n=A,T,C or G
  unsure (572): n=A,T,C or G
  unsure (577): n=A,T,C or G
ctgtgagcaaaaggagaagtatcagcttctcaagggcctagggtttgttggaagggcaaggcaggggcaaaggaggatacagaacaagggggcaagtaccagtgcctgggatggacccatccattcaggcagggggtgtggggtgtcccctgtgcttagaaaccacctagcatcatagctgcaacagcactttattgggatctgagtctacagttcacatagggaggtgaagccgtgggagaagcaggggtaaaaaaaaaaaaaaaaaaaaaaaaaaaaaggggggagggctgttgtgttggtgcagggggggtccatgcgcactttatcccctgagcgtagcagtgcctgatgccacatccgcttgagtggcaggcgagtgaanatgttgcccaaatcctggaccacaacagtgtccttctcatacctaaaatggctgggcacccctccagcacacggggcatanagattgtagatgttgaggccagagttgcccacgatgcgggccacttcctgaagattggtcacgcattccaggtctttgttgtcatanaagttacacttgttttganagcancagtgggtc

SEQ ID NO: 8204 - DNA, 610 bp, Homo sapiens
  unsure (604): n=A,T,C or G
ccagggccatccaaaacattgagatgacccaagaggatgtccgactcattggtctcagtgccaccctacccaactatgaagatgtagccacctttctacgtgttgaccctgccaagggtctcttttactttgacaacagcttccgtccagtgcctctggaacagacatatgtgggtatcacagagaaaaaagctatcaagcgtttccagatcatgaatgaaatcgtctatgaaaaaatcatggaacatgctggaaaaaatcaggtgctggtgtttgtccactcccggaaggagactggaaagacagccagggccatccgggacatgtgcctagaaaaggacactctgggtctgtttctgagggagggctcagcctccacagaagtcctgcgaacagaagctgagcagtgcaagaacctagagctgaaggatcttctgccttatggctttgctattcatcacgcaggcatgaccagggttgaccgaacactcgtggaggatctttttgctgataaacatattcaggttttagtttccacagcaactctagcttggggtgtgaatctccctgcacatacagtcatcatcaaaggcacccaggtgtncagtcc

SEQ ID NO: 8205 - DNA, 516 bp, Homo sapiens
  unsure (510): n=A,T,C or G
ccaagaattcaaggacttgtaggagataagtgaaggctattacagggattttgtcctggtttggtaggtttctcttggagaaataccactacaccctggtctagaaatgagttttgaagacttggggagttaaagggcactgagttttgctctcaccgtaccctgattccaggttttacatggagaaataacctgagggactttatttctatccaatgccctggtttccatcctgaccagaggatgatgacatccgctgataggccatgcttctgtcttctcttatgtgcctcatgccaagcctcgaaatataccttctggaccatcatttccacatctaccttgtgactagaagtcctagttatggtattttgaaatttatgatccataatccttgccagaaatcctgcagcgaaccatggcatggcatcatcctagtcattgatttcaatcttttgccttttgctcccctggaatcttgggccaattgcaggagggggctctgtttgnctctct

SEQ ID NO: 8206 - DNA, 414 bp, Homo sapiens
  unsure (172): n=A,T,C or G
  unsure (180): n=A,T,C or G
  unsure (200): n=A,T,C or G
  unsure (202): n=A,T,C or G
  unsure (238): n=A,T,C or G
  unsure (242): n=A,T,C or G
  unsure (259): n=A,T,C or G
  unsure (260): n=A,T,C or G
  unsure (297): n=A,T,C or G
  unsure (299): n=A,T,C or G
  unsure (326): n=A,T,C or G
  unsure (341): n=A,T,C or G
  unsure (348): n=A,T,C or G
  unsure (374): n=A,T,C or G
  unsure (376): n=A,T,C or G
  unsure (377): n=A,T,C or G
  unsure (384): n=A,T,C or G
  unsure (394): n=A,T,C or G
  unsure (404): n=A,T,C or G
  unsure (406): n=A,T,C or G
ctgttttaagtgtattaacgcattttggtaaatttacagacttgttcaaccacaaccacagtctgattttagaacatttccatcaacttcaaagatccctggtgccatttgtagtcctccaacccatctccgatctatcttgtttctatgacttgccttttctggctatttnatataaangggatcatatgacatgtggntncctatatctgacttttttcatttagcataacgtttntgangctcatccatgttgtannactccatgccatgttgtgggctacataatattccatngnatggatataccacattttgcttatcanttaatggacatttangttttgnctactttttggcattaatagtgctgntnngaacaancatgtataantctttgtatnanagccactt

SEQ ID NO: 8207 - DNA, 606 bp, Homo sapiens
  unsure (568): n=A,T,C or G
ctgaacagagaaaggaattaaaacgctttaattaaaaaatcacgagtggatgataaagtgtgtagaaactgaaaatttacaaactatttaaaacctggaatcgctgactgttcagaaactacacagatggatcatgggtggtggtgaacagcagaaagggattatggatgaatctgcattgttctagctgctccccatgccacccgtctccgaggaaagcctgacattgattagatattgagccaggctaatgctggcagcagatccagtgatggtaacctgcctatcagtagatccttccactgggttcgcaattttgatctgcgccccagacatctgacggatctcattgattttggcgccttgacgcccgattatgcagccaatcaaatcgtttggaatggtgagttcatgagaagtagtctgagcagatgcatccaaacctgcccaatagcctttcacctctggagagctggattcaatgccactgaatccggtgttgccatgcgtcatgggaaaatgagactgttgcattgccaactggtgcagcttggtcaaatctggctgnggaatggcatactgtccttgaatggtataggacctgcc

SEQ ID NO: 8208 - DNA, 392 bp, Homo sapiens
ctggcagatgcagaagaagcgatgtatcagaatgtggatggccgtgtttcggaatgtcctcacacctaccaaaacaggcgacctttcagcagagagatggatttggggctactctctccgcaggctcaggtcgaagattcgtagaggaacaatttagttttaaggacttcatccctccacctatccctaacaggctgtagattaccaaaacaagattaatttcatcactaaaagaaaatctattatcaactgctgcttcaccagacttttctctagaagctgtctgcgtttactcttgttttcaaagggacttttgtaaaatcaaatcatcctgttacaaggcaggaggagctgataatgaactttattggagcattgatctgcatccaagg

SEQ ID NO: 8209 - DNA, 390 bp, Homo sapiens
gcagaaaccagggtggttatgaccgctactcaggaggaaattacagagacaattatgacaactgaaatgagacatgcacataatatagatacacaaggaataatttctgatccaggatcgtccttccaaatggctgtatttataaaggtttttggagctgcactgaagcatcttattttatagtatatcaaccttttgtttttaaattgacctgccaaggtagctgaagaccttttagacagttccatctttttttttaaattttttctgcctatttaaagacaaattatgggacgtttgtagaacctgagtatttttctttttaccagttttttagtttgagctcttaggtttattggagctagcaataattggttctggcaagtttgg

SEQ ID NO: 8210 - DNA, 123 bp, Homo sapiens
  unsure (31): n=A,T,C or G
  unsure (37): n=A,T,C or G
  unsure (75): n=A,T,C or G
  unsure (97): n=A,T,C or G
cccgcctcagcctcccaaagtgctgggagtncaggtntgagccactgcgcccagccagggatttcttttttaagngaaaaataaaaagatcactatntagacacatgtggctggaatgtggga

SEQ ID NO: 8211 - DNA, 293 bp, Homo sapiens
tcgactcacagatggatgacatggacatggacttagacaaggaatttctccgggacttgaaggagctcaaggtgctagtggctgacaaggaccttctggacctgcacaagagcctggtgtgcactgctctccggggaaagctgggcgtcttctctgagatggaagccaacttcaagaacctgtcccgggggctggtgaacgtggccgccaagctgacccacaataaagatgtcagagacctgtttgtggacctcgtggagaagtttgtggaaccctgccgctccgaccactgg

SEQ ID NO: 8212 - DNA, 501 bp, Homo sapiens
ggacgtgctcttcagaagcattagtgaaagggacccttacctcgtgtcctatcttagacagcagaatttgtaaaatgagtcagttaggtagtctggaagagagaatccagcgttctcattggaaatggataaacagaaatgtgatcattgatttcagtgttcaagacagaagaagactgggtaacatctatcacacaggctttcaggacagacttgtaacctggcatgtacctattgactgtatcctcatgcattttcctcaagaatgtctgaagaaggtagtaatattccttttaaattttttccaaccattgcttgatatatcactattttatccattgacatgattcttgaagacccaggataaaggacatccggataggtgtgtttatgaaggatggggcctggaaaggcaacttttcctgattaatgtgaaaaataattcctatggacactccgtttgaagtatcaccttctcataactaaaagcagaaaagctaa

SEQ ID NO: 8213 - DNA, 50 bp, Homo sapiens
  unsure (15): n=A,T,C or G
  unsure (19): n=A,T,C or G
  unsure (30): n=A,T,C or G
  unsure (37): n=A,T,C or G
  unsure (44): n=A,T,C or G
ttttttttttttttngctngcctgattttnattattnaaaaaantggaaa

SEQ ID NO: 8214 - DNA, 304 bp, Homo sapiens
  unsure (20): n=A,T,C or G
  unsure (21): n=A,T,C or G
tatgtatttatttaagcatnnaatatttgtgcaagaatttggaaaaatagaagatgaatcattgattgaatagttataaagatgttatagtaaatttattttattttagatattaaatgatgttttattagataaatttcaatcagggtttttagattaaacaaacaaacaattgggtacccagttaaattttcatttcagataaacaacaaataattttttagtataagtacattattgtttatctgaaattttaattgaactaacaatcctagtttgatactcccagtcttgtcattgccag

SEQ ID NO: 8215 - DNA, 535 bp, Homo sapiens
ccactagctgaatcttgacatggaaggttttagctaatgccaagtggagatgcagaaaatgctaagttgacttaggggctgtgcacaggaactaaaaggcaggaaagtactaaatattgctgagagcatccaccccaggaaggactttaccttccaggagctccaaactggcaccacccccagtgctcacatggctgactttatcctccgtgttccatttggcacagcaagtggcagtgtctccaccacctgttgaatgaaagccaggtaaaaagggaaaagagagaaaagaaaaaaaagggattggcaccaaaactgtaaggcagtgtgctccccaacccaaaaggtagctgataaacccccaactctatcttaccaagaggctcctctgtaaattacctacctgtttacctcttaacatttacccagaataaagagacatagaagaagttctccattccaccttcctctgatcagaattctgccagcttatatgggtattagctttgtataggaccgcttacctatgatggtg

SEQ ID NO: 8216 - DNA, 602 bp, Homo sapiens
  unsure (554): n=A,T,C or G
actggataataagccatggggattgtggaacctaaaggcccaacagccacagactgggccatgggaagatacagagaggctccaggaaatgcggctgacatggtggggactgtggcagcccctgggtgcacaaagctcggacgatagagctagaagaggcagaagagaaggcaaaatgttactttatgacattcctatttgagatctctttaatgagctaattcttaattctccttatgcaggttatactttttgtaagattatacaagttgcctttccactggccttcaatattctcctggatcactttctgctatagctaatgttgggctcacagaacgcaaattcatcttctgcaccttagcctgtgccaaataacacaaaatcatcaaataatgcactttcaactccgacaaaaattgccaaattatatagtgttttagattattcatgttagcatttgtgaagagtaaatatgtgaagtcagatttagctaaggactaaaggaccaccctaagagtattcccagctagttcaaatctggcaaactggangcacctctgagtaggcaggtggagcatcggtatagggtggagcctgag

SEQ ID NO: 8217 - DNA, 527 bp, Homo sapiens
  unsure (415): n=A,T,C or G
  unsure (428): n=A,T,C or G
  unsure (438): n=A,T,C or G
ctggtttttaattctaatagtataaaaattggaaatttgaaatagttctgtaaaagaaaaaaatgtaaaaatacatctgctttctctcatggtttaatacagcattggaaggctttcagatgttttcttaaaaaaaaacaaaacccaaaaaaactcaacatttaaaaccaaatctcagcttcatttccagaaatattgcagtttggtttaggtaatgtttcatttaatctactccagtttccacaaaatggcattttattaaaaaaacctttcagttatttggtccttttgcaatttgctgtgcacataatgcctactgtaccaaacttttattgcctttaaatttagttgtaattttattgataaaatttaaatctagtgtctttatttcttctgttacaatagtgttgcttgngtaagcaggttanagtgcacagngtccccaattgttcctggcactgcaaaaccaaattaaacaattccacaaagaattctgacatcaatgtgttttcctcagtcaggtctat

SEQ ID NO: 8218 - DNA, 495 bp, Homo sapiens
cctaagttaagaatgctacagaaaaatatcgatccctaagcgtatttactgttatgtgaatgtgtgtgtcaaaggacttaggtgctttgggggagaggagggtgaagacaggaatttattcattgagcgaatagttattaagcgcccactctattccagacaccgttctaggcattaggtgaacagcagtgaacaaaacagacggaaatctgtgtctacttgtagctcacattttagagaggaaggcacatactaagcaaagtaattagaaacatactgtattttaggtcgtgatagtcctgaagagaaacgtaaagcagggaagaagggtataaagtgacacaggaaggtcttgctgaaaagatgacttttaagtaaagggctgacagaagtgggagatttaaccacgcgaatatcttgggaaagtgcagtcagacagagggaccagccattgcagaggtcatgaagcagaaacgtgctagaatagcaaggagg

SEQ ID NO: 8219 - DNA, 607 bp, Homo sapiens
ggcaggtgtggtgccttggctaagtccacagacttctgagaggcccacgctttcttcttctccagaaataaaccctgaaactcaagcagctttaatcagagggcaggattccacgatagcagcatcagaacagcaagtggcagcgagaattcttgattccaatgatcaggcaacagtaaaccctgtggaatttaatactgaggttgcaacaccaccattttcccttctggagacttctaatgaaacagatttcctgattggcattaatgaagagtcagtggaaggcacggcaatctatttaccaggacctgatcgctgcaaaatgaacccgtgccttaacggaggcacctgttatcctactgaaacttcctacgtatgcacctgtgtgccaggatacagcggagaccagtgtgaacttgattttgatgaatgtcactctaatccctgtcgtaatggagccacttgtgttgatggttttaacacattcaggtgcctctgccttccaagttatgttggtgcactttgtgagcaagataccgagacatgtgactatggctggcacaaattccaagggcagtgctacaaatactttgcccatcgacgcaca

SEQ ID NO: 8220 - DNA, 572 bp, Homo sapiens
  unsure (150): n=A,T,C or G
  unsure (180): n=A,T,C or G
  unsure (181): n=A,T,C or G
  unsure (304): n=A,T,C or G
  unsure (335): n=A,T,C or G
  unsure (346): n=A,T,C or G
  unsure (431): n=A,T,C or G
  unsure (494): n=A,T,C or G
  unsure (496): n=A,T,C or G
  unsure (501): n=A,T,C or G
  unsure (531): n=A,T,C or G
  unsure (560): n=A,T,C or G
  unsure (564): n=A,T,C or G
  unsure (570): n=A,T,C or G
cctgaagatacattctattttgatcctgagtttactgcaaaaactcccaaagattcacctggcattccacctagtgctaatgcacatcagctttttcgggggtttagttttgttgctattacctcagatgatgaaagccaagctatgcanacagttggtgtacattcaattgttcagcannttacacaggaacagtattcagtttactgatggatatgaagtaaaagaagatattggagttggctcctactctgtttgcaagagatgtatacataaagctacaaacatggagtttgtagtgaanattattgataaaagcaagagagacccaacanaagaaattganattcttcttcgttatggacagcatccaaacattatcactctaaaggatgtatatgatgatggaaagtatgtgtatgtagtaacanaacttatgaaaggaggtgaattgctggataaaattcttagacaaaaatttttctctgaacganangccantgctgtcctgttcactataactaaaaccgntgaatatcttcacgcacaaggggtggttnatanagactnga

SEQ ID NO: 8221 - DNA, 536 bp, Homo sapiens
  unsure (459): n=A,T,C or G
ctggtttcagtgaaactgccaaaatcctcaagccaggaagtagaagccaaggagctgtcctttgttttggattacataaaccagtcacccaagtgcattgcctttggaaacgagggagtatatgttgctgcagtacgggaattttacttgtctgtttattttttcaaaaagaaaacaacatcaaggtttactttatcatcatcaagaaataagaagcatgctaaaaacaattttacgtgtgtatcatgtcacccaacggaagactgcatcgcatctggtcacatggatggcaaaattcgtctttggaggaatttttatgatgataagaaatatacgtacacatgtttacattggcaccatgatatggttatggatttggctttttcagtgacaggcaccagtctgctgagtggcggtcgtgaatctgtacttgtagagtggcgcgatgcaacagagaanaataaggagtttctcccgcgtttaggagctactattgaacatatctcagtctcgcctgcaggagatttattctgcac

SEQ ID NO: 8222 - DNA, 533 bp, Homo sapiens
  unsure (144): n=A,T,C or G
  unsure (383): n=A,T,C or G
  unsure (405): n=A,T,C or G
ccagtggaatgatgttccctgcaattaccatctcacctatacgtgcaagaaaggaacagttgcttgcggccagccccctgttgtagaaaatgccaagacctttggaaagatgaaacctcgttatgaaatcaactccctgattanataccactgcaaagatggtttcattcaacgtcaccttccaactatccggtgcttaggaaatggaagatgggctatacctaaaattacctgcatgaacccatctgcataccaaaggacttattctatgaaatactttaaaaattcctcatcagcaaaggacaattcaataaatacatccaaacatgatcatcgttggagccggaggtggcaggagtcgaggcgctgatccctaaaatggngaacatgtgttttcatcatttnagccaaagtcctaacttcctgtgcctttcctatcacctcgagaagtaattatcagttggtttggatttttggaccaccgttcagtcattttgggttgccgtgctcccaaaacattttaaatgaaagta

SEQ ID NO: 8223 - DNA, 477 bp, Homo sapiens
  unsure (23): n=A,T,C or G
  unsure (75): n=A,T,C or G
  unsure (304): n=A,T,C or G
  unsure (312): n=A,T,C or G
ccaacatggagaaaccccatctntactaaaaatacaaaattagccgggcgtggtgtcgggcgcatgtaatcccanctactcaggaggctgaggcaggagaatcgcttgaacctgggagacagaggttgcagtgagccgagatcacgccattgcactccagcctgggtgacaagggcaagactctctcaaaaaaaaaaaaaaaaaaaattttttttttgactctcctgagtatctgggccatgccttgcttttcaccggtgttatctttatcaaaggcacctaaaccggcagggtcagtcacgtnacccagancacttaatagttccgtggaaaagcctcgccggttccagaggcagcccttggcagacctgcccgggcggccgctcgattatggcccaaacccatgcaatgggccagttctttgaaaggaatagtgttccataactcacacaaggagaaatagaaaatttgaatagg

SEQ ID NO: 8224 - DNA, 545 bp, Homo sapiens
  unsure (419): n=A,T,C or G
ccttctgtccacgcccaccttacctgctgcttcccagaagaggaagcgggaagaggaaaaagactccagctcaaagtccaagaaaaagaaaatgatctctactacctcaaaggaaactaagaaagacacaaagctttactgtatctgtaaaacgccttatgatgaatctaagttctatattggctgtgatctttgtactaactggtatcatggagaatgtgttggcatcacagaaaaggaggctaagaaaatggatgtgtacatctgtaatgattgtaaacgggcacaagagggcagcagtgaggaattgtactgtatctgcagaacaccttatgatgagtcacaattttatattggctgtgatcggtgtcagaattggtaccatgggcgctgcgttggcatcttgcaaagtgaggcanagctcattgatgagtatgtctgtccacagtgccagtcaacagaggatgccatgacagtgttcacgccactaacagagaaggattatgaggggttgaagagggtgctccgttccttacaggcccata

SEQ ID NO: 8225 - DNA, 569 bp, Homo sapiens
ccaaatcttagctatttgaggaatgtagggagaaaagccaccttctctctctatgtctgaaggttcccatggctgtctctttgcccaaggggcaaactttccatcagggcatcttctgtgcctctgaggatcattttccaattataggcaatggtagtacgtgtttcagtgcagaatgagatagagttgtttaatttgacaataaagcgatgcgtcaaaaacctcagtcaacacagtaagtgttttcttgttttcctgctgaccaacctaattctggtttcatacagggcagccaggtgcccacctaaaagactgcacttctcaacttccagttgtttctatggataatggttggaagcagaaattgggttggggcttccagataatcccccctcacagggactgcttcaagagaaagggatgccctttggttctttctcctttccactgcctggaatgtgatgtctgacactgtggcagccatactggcataatgaggccaactctctgccatgctaagagtggcagagctgggaattgaaaagagcctgctagccttgggttgcttc

SEQ ID NO: 8226 - DNA, 636 bp, Homo sapiens
  unsure (603): n=A,T,C or G
  unsure (615): n=A,T,C or G
ccaaatgggagagtggttacaacacacgagctacaaactacaatgctggagacagaagcactgattatgggatatttcagatcaatagccgctactggtgtaatgatggcaaaaccccaggagcagttaatgcctgtcatttatcctgcagtgctttgctgcaagataacatcgctgatgctgtagcttgtgcaaagagggttgtccgtgatccacaaggcattagagcatgggtggcatggagaaatcgttgtcaaaacagagatgtccgtcagtatgttcaaggttgtggagtgtaactccagaattttccttcttcagctcattttgtctctctcacattaagggagtaggaattaagtgaaaggtcacactaccattatttccccttcaaacaaataatatttttacagaagcaggagcaaaatatggcctttcttctaagagatataatgttcactaatgtggttattttatattaagcctacaacatttttcagtttgcaaatagaactaatactggtgaaaatttacctaaaaccttggttatcaaatacatctccagtacattccgttctttttttttttttttttttttttganacagtctcgctntgtcatccaggctggagtgca

SEQ ID NO: 8227 - DNA, 389 bp, Homo sapiens
ctgtgatgagttgataccagagtatctcaattttatccgtggtgtggttgactctgaggatctgcccctgaacatctcccgagaaatgctccagcagagcaaaatcttgaaagtcattcgcaaaaacattgttaagaagtgccttgagctcttctctgagctggcagaagacaaggagaattacaagaaattctatgaggcattctctaaaaatctcaagcttggaatccacgaagactccactaaccgccgccgcctgtctgagctgctgcgctatcatacctcccagtctggagatgagatgacatctctgtcagagtatgtttctcgcatgaaggagacacagaagtccatctattacatcactggtgagagcaaagagcaggtgg

SEQ ID NO: 8228 - DNA, 355 bp, Homo sapiens
tcgacttttaaaagaggtatgagggctgggcgtggtggcttatgtttgtaatcccagctacttgggaggctgaggttgcagccaagattgcgccactgcactacagcctgggcgacagagcaagactctcaaaaggaggcatgaaatgcacctcaatcttttgctccaagtctgccaaagattgtcaaaccctccctgttaaaaaaaaaaatcagtttacctactctcccttctatataaaggaccctaaaattaaatgtcaatgccaaaatgcgaagtgcagatcgtcttctctccaaataagagttacttggaatccttaacaaatccaaggagaagaagcgaccactgcgaa

SEQ ID NO: 8229 - DNA, 337 bp, Homo sapiens; identical to SEQ ID NO: 7576

SEQ ID NO: 8230 - DNA, 286 bp, Homo sapiens
ggcatctctgtactgaaccccaacaaaaccaaggtccagggaagctgtgagggtgcccatccccacctgcttctctcattcccctatggacacctcagctttggattcatgcaggacctccagcagaaggttgtctacctgagctacatggcggtggagtgcaatgtgtccttcccccacgcagcacagtggacattctcggctcagaatgcatcccttcgagatctccaagcacccctggggcagagcttcagttgcagcaactcgagcatcattctttcaccag

SEQ ID NO: 8231 - DNA, 587 bp, Homo sapiens
ctggcattggtctagagctttataaggccattcagcgagggaccatcaagtgcaactttgcgggggttgccttgggtgattcctggatctcccctgttgattcggtgctctcctggggaccttacctgtacagcatgtctcttctcgaagacaaaggtctggcagaggtgtctaaggttgcagagcaagtactgaatgccgtaaataaggggctctacagagaggccacagagctgtgggggaaagcagaaatgatcattgaacagaacacagatggggtgaacttctataacatcttaactaaaagcactcccacgtctacaatggagtcgagtctagaattcacacagagccacctagtttgtctttgtcagcgccacgtgagacacctacaacgagatgccttaagccagctcatgaatggccccatcagaaagaagctcaaaattattcctgaggatcaatcctggggaggccaggctaccaacgtctttgtgaacatggaggaggacttcatgaagccagtcattagcattgtggacgagttgctggagacagggatcaacgtgacggtgtataatggacag

SEQ ID NO: 8232 - DNA, 364 bp, Homo sapiens
cctattctgaactgcagatgctgtcccccagcgagcggcagtgtgtggagacggtggtcaacatgggctactcgtacgagtgtgtcctcagagccatgaagaagaaaggagagaatattgagcagattctcgactatctctttgcacatggacagctttgtgagaagggcttcgaccctcttttagtggaagaggctctggaaatgcaccagtgttcagaagaaaagatgatggagtttcttcagttaatgagcaaatttaaggagatgggctttgagctgaaagacattaaggaagttttgctattacacaacaatgaccaggacaatgctttggaagacctcatggctcgggcaggagccag

SEQ ID NO: 8233 - DNA, 627 bp, Homo sapiens
ctgtggctgtctgtcagagaagcacatttttctgcagataattagaatggcttcccccatctctcacggactgtcccaagtctagaaaagaattgagttcctcttctattagtcaaataaaagggaagagaatgtttgtcttcctttcctttctgtagtgttaagaaaataaacgaacttaatgattctaaattatcagtgagcttaacactgtactatagaccaaagattaccttttcaaaaagtcctttgaggtgaaatattttgtatacgtaatacatagatgcacatataaacacacacatatagaatctcaatattttaacacttctttgggtagctgtactaactcactaaccctgaggaaaaagttaagaaattgaaagtgttttcttcaaaagttgagatttaacaataaaaggtgttactttgataactaaaaggaactttattatcctcttcctaaaataaaccaatgcctattctgaaaatggcacttgcaattacaatttgccattatcaaagctaccactgaggtagaggcattatctaaaacaaataccacttatcatttattggcagttacctcgagagagacccatacaccatcttctagcagagcacagt

SEQ ID NO: 8234 - DNA, 276 bp, Homo sapiens
ctgagataacgaggaaatattctgaaatggatcccaaatatttcatcttaattttgttttgtggacacctgaacaatacatttttttcaaagacagagacaattacaacagagaagcagtcacagcctaccttattcacatcatcaatgtcacaggtattggctaattctcaaaacacaacagggaatcctttgggtcaaccaacacaattcagcgacactttttctggacaatcaatatcacctgccaaagtcactgctggacaaccaacaccag

SEQ ID NO: 8235 - DNA, 312 bp, Homo sapiens
  unsure (15): n=A,T,C or G
  unsure (28): n=A,T,C or G
  unsure (118): n=A,T,C or G
  unsure (180): n=A,T,C or G
  unsure (199): n=A,T,C or G
  unsure (211): n=A,T,C or G
  unsure (215): n=A,T,C or G
  unsure (232): n=A,T,C or G
  unsure (234): n=A,T,C or G
  unsure (235): n=A,T,C or G
  unsure (244): n=A,T,C or G
  unsure (264): n=A,T,C or G
  unsure (271): n=A,T,C or G
  unsure (273): n=A,T,C or G
  unsure (281): n=A,T,C or G
  unsure (285): n=A,T,C or G
cagctagtacccggngggtcaccatgangttcaatcccttcgttacctcggaccgcagtaaaaaccgcaaacgtcacttcaatgccccctcacacgtgcgcaggaagatcatgtcatncccgctttccaaggagctgcggcagaagtacaatgtccgctccatgcccatccgcaaggacnacgaggtccaggtagttcnaggacactacanaggncagcaaattggcaaggnanntccaggtgnacagaaagaaatatgtcatntacatcnancgggtgcngcgngagaaggccaacggcacaactgtccac

SEQ ID NO: 8236 - DNA, 601 bp, Homo sapiens
  unsure (576): n=A,T,C or G
aaaaaaaaaaaaaggggggggcacattttaagttgtcaacaaaattttttttcatcataaagttatacaactatagaggatgtaatttttgacctattttaaatattgtcattctaaaataagcatgtaatatcactttcaggatatattcagtggaatctaaatatcatagtggtttgacctcttacatcattcttttaaaagtagtcttttattaagagtcaaaaattttatatttttgttttcgttggactaattctaaaatttaagttcctcttacggaatgttatcaaaaattatatagttatatgcttagaagtcttctattgattaagccatcaaacttaagtacatcaaaatttgtactttaaagtttaaattcttttttccttgtgaacataatcctataaactaaaattttcctggaccaagttatttttgtagtttactaatatacaattgatcaaaacaatataaagctatcgtaacatgtgaaagattatacaaattgtaaaaattttgttggaaatatgtcttaatgagatgattagggctgtttttcccaattcacatttnccgtagggaaatattccttaaaact

SEQ ID NO: 8237 - DNA, 632 bp, Homo sapiens
ctaatatcataaataaggttgtttaagacgtgcttcaaatatccatattaaccactatttttcaaggaagtatggaaaagtacactctgtcactttgtcactcgatgtcattccaaagttattgcctactaagtaatgactgtcatgaaagcagcattgaaataatttgtttaaagggggcactcttttaaacgggaagaaaatttccgcttcctggtcttatcatggacaatttgggctagaggcaggaaggaagtgggatgacctcaggaggtcaccttttcttgattccagaaacatatgggctgataaacccggggtgacctcatgaaatgagttgcagcagaagtttatttttttcagaacaagtgatgtttgatggacctctgaatctctttagggagacacagatggctgggatccctcccctgtacccttctcactgccaggagaactacgtgtgaaggtattcaaggcagggagtatacattgctgtttcctgttgggcaatgctccttgaccacattttgggaagagtggatgttatcattgagaaaacaatgtgtctggaattaatggggttcttataaagaaggttcccagaaaagaatgttcatccagcctcctcagaa

SEQ ID NO: 8238 - DNA, 336 bp, Homo sapiens
  unsure (31): n=A,T,C or G
  unsure (38): n=A,T,C or G
  unsure (54): n=A,T,C or G
  unsure (97): n=A,T,C or G
  unsure (117): n=A,T,C or G
  unsure (140): n=A,T,C or G
  unsure (142): n=A,T,C or G
  unsure (164): n=A,T,C or G
  unsure (245): n=A,T,C or G
  unsure (263): n=A,T,C or G
  unsure (312): n=A,T,C or G
  unsure (321): n=A,T,C or G
cttttttttttttttttttttttttttttanatatttnaaatacaactttattntgattctaaacgaaaaggaatgggaatgacagtaacaaacaanatttcaccactgaatattgngatgtgactgcagcagtcttatntntgaaactcaaggaatcaactgngttctaaaacagctaaatatgcaggtccaaacaatgaagttattttttaaactgccacattcactccgaagcccactcatntccttcagcatcccacanatgaagcacatgttccgcttagctagataataatgagggggcacacacnctgcaccgntgacatcacaggaca

SEQ ID NO: 8239 - DNA, 488 bp, Homo sapiens
  unsure (387): n=A,T,C or G
  unsure (477): n=A,T,C or G
ctctttgggacatttaaccatactgtttgacaggaatgtaaggtaattattgacaaaagcacttttagatttccttgattaaagaggaaccatcagttttagatcagtaataatagttgtttatccattagaaaattgcatagctactgttaaggttttagttacattgcattcatgcattcaagttttaaatcttaaatttctttttattttcttcattttaaaagtacagaagtcagattctatttgtgcattttattgtcagaagctttgttgtgtatctttattatcttaactatttatttcagcatatatatagagacaagtctagaagctccctgaaaaactgacttgcgaaaaggaatcacagtggggaaagacttttanttaacaaaaccttaaacaaaaatggaatataaaatgattttttcccagccattgagaccaaatatatatggaatcttgactcttaattgnttgtctttaat

SEQ ID NO: 8240 - DNA, 162 bp, Homo sapiens
ctgcttcttcttgaagtaagcatcagtaagatgttttgggatttttacattgctgatatcgattttggttgaagtggcaatgacaaatttctggtgtgttcttcgtagaggaactcgattgaggaccagaggtccagtcacaagtaataagccactagccag

SEQ ID NO: 8241 - DNA, 553 bp, Homo sapiens
cctgtgagtgaagtgcctctcagagcagtcacccagggaagggaggagggcagggaacggggctaggggagatgcagggacagaaatcagcagaaacactccatgctggttctgactcgctccatctcgtgcaggaagctgtagaactgaggcaaggttaattctatatacacattttcggtttgatttcctttcttaaccaccaactttagttgtaaaaatatacttcccactttctccaattcgctgctcccagatgtcactccaaatttccactccatatctatgagctggttaatcatcagagtctgacctatggcccatcgagcaagggtgggagcattctgcttccacttttcagaaaagtaagtggctttctcctcactaagacccagagttatgaaatccgcctggacctgcttggctgtgagactcttcttcaaagcaccatttggaaccagaaggaggcttttcacgatgcttctgagggagccaagactgatctgattggtggtggcaaattcagagagctgagccagaaatctttccacct

SEQ ID NO: 8242 - DNA, 543 bp, Homo sapiens
  unsure (406): n=A,T,C or G
  unsure (408): n=A,T,C or G
  unsure (427): n=A,T,C or G
  unsure (428): n=A,T,C or G
  unsure (435): n=A,T,C or G
  unsure (441): n=A,T,C or G
  unsure (444): n=A,T,C or G
cctactgtaaagagatgatgcatggtaaaaggaaaatggcagctctatgttattaccagtagtgaaggtgaatgatggattgttacatacagagtaagacttaaatgttgtgaagtttcctacagtttgacaaccaaaacatctaaaaaattcaaataaattttaaggtaatcttgatcttggttgtgagttgcaccagagaggacagtttatttttagttaacttgtacttaacctgcacaataagagtggtgactgactcaaatgtaggtagtactttattgtattccaatttaaaaaaacaaaattaagtctatattttaaaaactctgacaatagcaagatatttaatgaactctacttcatatctagttcatttttttttctggtttgaaaaaaagatcancnttccctgaataaacaaaanngaatgtnaataancangaaaatacaaaaccataatttccaaaaacgaaatgaatgggccaacagtaaaatgcacaatgagccacaactgccctggtatttaagaaaataaaggtc

SEQ ID NO: 8243 - DNA, 462 bp, Homo sapiens
acgaggcaaaaaaaaaaaaaaaaacagtaaaaggtgtctaaataggaaaggaagatgtgaaattatcactgttacctgacaatgtgacgttacatacaaaaagccacaaagactccagaaaaaaactattagacctggtaaatgaatacagtaaagttgcaggatacaaaatcaacctacaaaaaatcagtagtgtttctaagtactaacaacaaactatctgaaaaagaaatcaagaaaacaataccatttataatagctaccaagtaaaataaaatacgtaggaatacatttaaccaacaaggtgaaagagccatacattgaaaactgtaaaacattgatgaaagaagttgaagtctgcaataaaggaaagatactctgtattcatagattagaagaagaattgttaaaatgcccatactactaaaagtgatttgcagattcaatgcattccctataaaa

SEQ ID NO: 8244 - DNA, 447 bp, Homo sapiens
ccactgtcacggtctgtctgacacttactgccaaacgcatggcaaggaaaaactgcttagtgaagaacttagaagctgtggagaccttggggtccacgtccaccatctgctctgataaaactggaactctgactcagaaccggatgacagtggcccacatgtggtttgacaatcaaatccatgaagctgatacgacagagaatcagagtggtgtctcttttgacaagacttcagctacctggcttgctctgtccagaattgcaggtctttgtaacagggcagtgtttcaggctaaccaggaaaacctacctattcttaagcgggcagttgcaggagatgcctctgagtcagcactcttaaagtgcatagagctgtgctgtggttccgtgaaggagatgagagaaagatacgccaaaatcgtcgagatacccttcaactccaccaaca

SEQ ID NO: 8245 - DNA, 494 bp, Homo sapiens
  unsure (437): n=A,T,C or G
  unsure (488): n=A,T,C or G
cctctaaaatcagatcccctagttactcctctgttctgaatctggggaagtagtaaaccaaaaagacagggaaaaccagatatttagagtcgaagcagcatgcaaaaaataataatgtttttaactaatgaaggctactggagttactaagaatcacctaaaaatgtgctactgtaccttgctcattttgcagatttagaagctgaaacatgggttaggttacttactaaaagtccacctgtggcaacctgcaaataatgcttatttatactaaagatgagtttatctgatagagttaggaaatttcttcttttgagtaagagtattgctataacatatatttttttctgaaatgttttaaaatagaagtacacctaattgttattggttaaaaaaaaaaagccatatgtgaatgaggttggtttttgggttttttnttttctgaattgtattagtccaaaagaactaaattagggtacttgtgctgnaccaaa

SEQ ID NO: 8246 - DNA, 490 bp, Homo sapiens
  unsure (450): n=A,T,C or G
  unsure (476): n=A,T,C or G
cctagtagtggggtgaggcttggattagcgtttagaagggctatttgttgtgggtctcatgagttggagtgtaggataaatcatgctaaggcgaggatgaaaccgatatcgccgatacggttgtataggattgcttgaatggctgctgtgttggcatctgctcgggcgtatcatcaactgatgagcaagaaggatataattcctacgccctctcagccgatgaacagttggaataggttgttagcggtaactaagattagtatggtaattaggaagatgagtagatatttgaagaactgattaatgtttgggtctgagtttatatatcacagtgagaattctatgatggaccatgtaacgaacaatgctacagggatgaatattatggagaagtagtctagtttgaagcttagggagagctgggttgtttgggttgtggcttagtgtcanctcgagataataacttcttggtctangcacatgaatattg

SEQ ID NO: 8247 - DNA, 493 bp, Homo sapiens
  unsure (33): n=A,T,C or G
tgggagagctagactaagttggtcatgatgcanaagctactcaaatgcagtcggcttgtcctggctcttgccctcatcctggttctggaatcctcagttcaaggttatcctacgcagagagccaggtaccaatgggtgcgctgcaatccagacagtaattctgcaaactgccttgaagaaaaaggaccaatgttcgaactacttccaggtgaatccaacaagatcccccgtctgaggactgacctttttccaaagacgagaatccaggacttgaatcgtatcttcccactttctgaggactactctggatcaggcttcggctccggctccggctctggatcaggatctgggagtggcttcctaacggaaatggaacaggattaccaactagtagacgaaagtgatgctttccatgacaaccttaggtctcttgacaggaatctgccctcagacagccaggacttgggtcaacatggattagaagaggatttta

SEQ ID NO: 8248 - DNA, 510 bp, Homo sapiens
  unsure (32): n=A,T,C or G
  unsure (77): n=A,T,C or G
  unsure (101): n=A,T,C or G
  unsure (115): n=A,T,C or G
  unsure (186): n=A,T,C or G
  unsure (239): n=A,T,C or G
  unsure (250): n=A,T,C or G
  unsure (291): n=A,T,C or G
  unsure (426): n=A,T,C or G
  unsure (465): n=A,T,C or G
  unsure (483): n=A,T,C or G
ctggtggatacagcgcgcacacagaagacggnctaccagcggaatcgaatgagatttgcccagaggaacctccgcanagacaaagatcgtcggaacatgtngcagttcaacctgnagatcctgcctaagagtgccaaacagaaagagagagaacgcattcgactgcagaaaaagttccagaaacantttggggttaggcagaaatgggatcagaaatcacagaaaccccgagactcttnagttgaagttngtagtgattgggaagtgaaagaggaaatggattttcctcanttgatgaagatgcgctacttggaagtatcagagccacaggacattgagtgttgtggggccctagaatactacgacaaagcctttgactgcatcaccacgaggagtgagaagccactgcggagcatcaagcgcatnttccacactgtcaccaccacagacgaccctgtcatccgnaagctggcaaaaactcangggaatgtgtttgccactgatgccatc

SEQ ID NO: 8249 - DNA, 436 bp, Homo sapiens
  unsure (341): n=A,T,C or G
  unsure (411): n=A,T,C or G
ctgccccagtcaatgaagattatgcatgagatcatgtacaaactggaagtgctctatgtcctctgcgtgctgctgatggggcgtcagcgaaaccaggttcacagaatgattgcagagttcaagctgatccctggacttaataatttgtttgacaaactgatttggaggaagcattcagcatctgcccttgtcctccatggtcacaaccagaactgtgactgtagcccggacatcaccttgaagatacagtttttgaggcttcttcagagcttcagtgaccaccacgagaacaagtacttgttactcaacaaccaggagctgaatgaactcagtgccatctntctcaaggccaacatccctgaggtggaagctgtcctcaacaccgacaggagtttggtgtgtgatgggaanaggggcttattaactcgtctgctgc

SEQ ID NO: 8250 - DNA, 503 bp, Homo sapiens
ctggccctgtcctgcagaatgaggtgtccggcccggtacagtgggtgttcatgcagatctgtctgggcgggaaacaccagcagctccggcatcaaggggtccaggagaaaatgcttccccttgagggctcgtaagtcatcgaggctgccagggaagaaccattcattcatcatttcctgaatttctccctgccaggccctatttcaacggtccattcatgcaacaaatgttaccacagctatggagaaatcaacagggtgataagggaatccgggatccgcagttgagggaatgggttgtcaagccagacttatgggtcaggagccccctctactgtttaccagcagtgggagcctgggcaagtgattcaatctcaagccccactggcatctctgtaaaatagtaggtgtgaggattcaatgagccaatatatccaagatacttacgtgccacaatttaataaatgttagctattcctgttgaagcataaccttggagaaagg

SEQ ID NO: 8251 - DNA, 236 bp, Homo sapiens
ccaagaagtacaagggccaaaagggcctggtcatcgccaagatggacgccactgccaacgacgtccccagcgaccgctataaggtggagggcttccccaccatctacttcgcccccagtggggacaaaaagaacccagttaaatttgagggtggagacagagatctggagcatttgagcaagtttatagaagaacatgccacaaaactgagcaggaccaaggaagagctttgaagg

SEQ ID NO: 8252 - DNA, 463 bp, Homo sapiens
  unsure (338): n=A,T,C or G
  unsure (356): n=A,T,C or G
  unsure (369): n=A,T,C or G
  unsure (375): n=A,T,C or G
  unsure (380): n=A,T,C or G
  unsure (434): n=A,T,C or G
  unsure (453): n=A,T,C or G
tcgacaaatacccacatgctgttttcctctgctaacgagttgcagagaaaaaaaacagcatgaatttggattttaatcacacatttcttctggaatctcatgtggattaaagatgccagggacagacatttgacgtttatgtttctcttcatcagcctgccgtagggctatttctctctcttccaaaaacaaatcagaagtgtcttcacctgcaaattcctttatttgaactaggaaatctcttaaatgttccttgaaagcaggaatatcttgatttaagctgaaaagccctgtcacaaagagctttacttgagcatcttgtaggtgagggaaggccnacttaaggagattagccncatattcctgaanaaaganttggntgttaactggatttccaggatttaatgatgtacttatttttccttcttcaaccnaattaaacatatatgcaangaattgatgc

SEQ ID NO: 8253 - DNA, 466 bp, Homo sapiens
ccacaggggaaggcaagaggcgatagctgggggtcacttgtcactagatggaagctccttggtccacacagtcccaaagaaaggtctgcccttgggcccacgaaacccatcccagccctcacaggctgaacctcaccctgggttttcccagagaggtgcccaagaagacccaagctgccccaagtcagaggagcagcaggaaacagcctcagaagtccgtcactcttcagtactcctcccttagaatgtccacttcctgtttggtgaccatggcaaccaaaagacaatggcagtgcagtgcgtgtgggatgggggagctccatcttccttgggtacatggggaggagactccagtgaccaggagaagcggggagagccatgggagatgttagagggacccagagaagatgggggacaggaaaaaggagagaatctgtctcaagtaaatggcctcctgccttggacc

SEQ ID NO: 8254 - DNA, 447 bp, Homo sapiens
ctgaaaggaggtggatggggacagagcaccaaggggaaggggccctcggcccaaggggggaggaacctagcccccaccccgctacagctccccactgaattcacagcacagagaacacctctcgcccaacaactccacatggaggtataccaagtccaggggtcaaaggagcaggtgggtgacagatgggcaggggcagtgaagatgacagcaggctcaggaggggaggtggcagaaacttcctcctacccatgggaggagacgatggggcgactgatattgctgttggtggtcatggcattcagctcccacctgatatcatgaggcaaacaggactggtctaggttatactgaatcacggccagtttgcacagagtcttcagactagggctaaagtccaaaatgtgtaagtcagaatgatctataaggtcaaattcatctcccagg

SEQ ID NO: 8255 - DNA, 539 bp, Homo sapiens
ctgacatcctaaaaacgaagtcaaattagggaaggatggccgtttccttgagtcaaaagcccagcaggattgcattataatgtatatttcttctgtagcataaaatggctgatccattttaaatccattttgaatcagtttgtagaagttagcatcaaccggaatgccagggtaaggattcacaccaagtgagaagatttcccacagtaatattccatatgaccagacatcactcttaatggtgtagatgccttcaaacaggctttcgggggccatccattttacaggcagacgggcattgcccctgacaacatagttggaatcactcatgatatctcgagccaatccaaagtcacatatcttcaccactttcccgtgggtgacaagcacgttcctggcggccaggtctctgtgaacacacgacttaaattccagaaattccattcctttggcaacttgatatgcaaagcaaagaagatcttcaaatgtaagcacattcaagtcctcctcttcttccagccttttttggttttcatatt

SEQ ID NO: 8256 - DNA, 401 bp, Homo sapiens
ccatcggtgctgaaattgagcattttaaatagtacagtaggctggtatacattaggaaatggactgcactggaggcaaatagaaaactaaagaaattagataggctggaaatgcttactttctgctctcattttctttcattttgtctgctgtctttttgaatgccaatactttcatttaaaatgttttgggagcacggcaacccaaaatgactgaacggtggtccaaaaatccaaaccaactgataattacttctcgaggtgataggaaaggcacaggaagttaggactttggctgaaatgatgaaaacacatgttcgccattttagggatcagcgcctcgactcctgccacctccggctccaacgatgatcatgtttggatgtatttattgaattgtcc

SEQ ID NO: 8257 - DNA, 383 bp, Homo sapiens
ctggcagaccccccaaccacatcagaggagttttcatttcttcctgggctgcttatctgggaagccttcaaagaattcgttacacatcatggcgatgcaggacaggaagacacagtactcttggaagtccacctcgttgtccctgttgctgtccaagttgctcatcagcttctggaaagcagcttcatctgtccttttccccaagaagctgggcagctcccgggtcagcagctcctttagttctgacttgttgagcttgaacttgtcaccctctttgcccgagtacttgtggaaggtggacaccatcacatccagggccttctccagagggcacgccatgacagcagtcaggatcaaaccaagaaagaagaagcgctgaggag

SEQ ID NO: 8258 - DNA, 442 bp, Homo sapiens
  unsure (413): n=A,T,C or G
cctagtagtggggtgaggcttggattagcgtttagaagggctatttgttgtgggtctcatgagttggagtgtaggataaatcatgctaaggcgaggatgaaaccgatatcgccgatacggttgtataggattgcttgaatggctgctgtgttggcatctgctcgggcgtatcatcaactgatgagcaagaaggatataattcctacgccctctcagccgatgaacagttggaataggttgttagcggtaactaagattagtatggtaattaggaagatgggtagatatttgaagaactgattaatgtttgggtctgagtttatatatcacagtgagaattctatgatggaccatgtaacgaacaatgctacagggatgaatattatggagaagtagtctagtttgaagcttanggagagctgggttgtttgggttgtggctc

SEQ ID NO: 8259 - DNA, 357 bp, Homo sapiens
ctgttgaggtgcagggcctcagctttgtcccggtgtgccacctctgaaccctgctgtctggtttaagtaccactcctgtgggaatggtggcattgttcctagttgtgcccggttcccactcccctcccccaggactggttgatgtctagagctgcctttcacgtggccccaccctcccctcttgcatagtggatctgaaaagcagcaccttgtgacttaacatcacctgcttcatgtgctgggctagctctcgtgccagccaaactcgggaggaaaagggacctaggatctaggcaggggctgggctgaaatcagtagagggcagggaggaaagaacacagttcccacgctctcatc

SEQ ID NO: 8260 - DNA, 391 bp, Homo sapiens
ctgaaaaaatcctggcaaactacaagctgtccacaagaaagcaaagcaacatgtttgaaggggtatggagtgctaactctgtgccacttttgcaagcaattttgctcagtctgtcattgtattagccttaacaaaactccttgtaattatagacgtttttattcaaaataagatcttactattatacaggtttctctcttttgactatatacagaagtgcaaaaagtcaaccttctccctagacgttccaacatgctaaattgcagcataatcaaccctcaagagtttgcacacacgctataattttcattacgtaaactttgagtatttggattatcaacaaaaagtcccttgttctatttattgattatgcagcttatttataacaagg

SEQ ID NO: 8261 - DNA, 501 bp, Homo sapiens
  unsure (457): n=A,T,C or G
  unsure (458): n=A,T,C or G
ggcaggtctgctgctaccaccctgactggaccagttctatcaagatacaacctagcaacaccctggaactcctagtcacaggcttactccccaaacccagcctattagcccagcctggtcccatggtggcccctggcgaaaatatgactcttcagtgtcaaggggaactgccagactcaacatttgtcctgttgaaggagggggctcaggagcctttagagcaacagaggccaagtgggtacagggctgacttctggatgccagcagtgagaggtgaagactctgggatctatagctgtgtttattatttggactctactccctttgcagcttcaaatcacagtgactccctggagatctgggtgactgataagccccctaaaccctctctgtcagcctggcccagcaccatgttcaagttagggaaggacatcacccttcagtgccgaggaccccnnccaggtgttgaatttgtcctagaacatgatggagaagaagcac

SEQ ID NO: 8262 - DNA, 347 bp, Homo sapiens
  unsure (278): n=A,T,C or G
  unsure (317): n=A,T,C or G
  unsure (332): n=A,T,C or G
ccaagagatgcagtgccaggaacccttaaacagttgcacagcatctcagctcatcttcactgcaccctggatttgcatacattcttcaagatcccatttgaattttttagtgactaaaccattgtgcattctagagtgcatatatttatattttgcctgttaaaaagaaagtgagcagtgttagcttagttctcttttgatgtaggttattatgattagctttgtcactgtttcactactcagcatggaaacaagatgaaattccatttgtaggtagngagacaaaattgatgatccattaagtaaacaataaaagngtccattgaaaccgngattttttttttttt

SEQ ID NO: 8263 - DNA, 297 bp, Homo sapiens
ctgtgtctctctttcctcttctgttcctataagggcagggcctccttcaggaacagccaccagtgagcttcctcctcccttctggtcagttggatttgtcactgttcagcatcttttcgatgattttcttaactatgggggatgcaggattgaggcaagctttccgcccattcttgagtgtggctatgacttcggtttgggcgcagtggggtccgggggacttcacgttcacactttggatgttcttggggtgaattccctgcagggtctgcaagcactggcagcgcagttcagtgg

SEQ ID NO: 8264 - DNA, 505 bp, Homo sapiens
ccatggttgaatatctggatgctatagaacatgcttataatggacttgctgcccagagatgtttaggaagttcaagtggattctgagccagatggttgctttagatccgcaccagtacgcaaaagttctatagccaacatactgcgttaacttgacacggtttagaccagttagactgtgcaaaaataggtagtctgcacacactacatgagccctttagcaccctgtttgctttagcactttcatcactttgttttccaaaaactcaaaacagccaaaaaactgatttgatatgggaatcacggtatttttcttgtgttttgttttgtttgtttgtttccaaattgtctaaatcactaaccaagatcattcgaccagcttaggaaaaacaaatagattgtgcatttgagttcagttttgattctgtaaagactttgcaaagcctacttcactaattatgtgctactgttaaatggtatttgataggttgttggaaaagataggg

SEQ ID NO: 8265 - DNA, 491 bp, Homo sapiens
  unsure (461): n=A,T,C or G
  unsure (470): n=A,T,C or G
accagtctcagcctcccaaagtactgggattataggcgtgagccactgtgcacggctgctgacccacatttaatagtataatgacattccctctaacagtgtcatttttgttttctttgtaccaataggtaatttgtcgtccagatgctctgctatatgtgaagtatcatttttctattgaacacaggtcatccttcagtttcatttttctcttcaccaattggatgctgcatacctggttttcagctcattcatgtgttagatcccctgtgtcctagatcgtatacctttctctttcttgatttactttctcattttatagagcacatcattgagtagaaagatggaaaataatttttgggatttatacaattaaaaatcattagtctcccttcaactttagtaataaaattgtagattggaaattattttccctcagaattttaaaactctttttctgnttctcttancttcttttcaggttgagaaga

SEQ ID NO: 8266 - DNA, 488 bp, Homo sapiens
  unsure (299): n=A,T,C or G
  unsure (455): n=A,T,C or G
  unsure (456): n=A,T,C or G
  unsure (472): n=A,T,C or G
ctgtggtttgttgtcaattggtggctgttggctggtctgcttagttatatcagtgaggaaggggacaatgttagaccttgtactgctgggacttagtgatgtcactgatgacaggaagcttctagttggttggttagtttcattggcctgatctggagagagtggactgagaattactggggctgtgagaacttgccttccctagaatcatggcctgtctttttcccacacaggaacttgagcttgttcctccctacacaggaacttgggggccaatagcattgtccctgattttcatnttttcactggttgtattattggagaattttactgtttaaaatgtaaatgaaaaatttatattctcattcagttcacatcagcaaagcattactcccatttaggggtagttttttttttttttttaaatgacatctgctaaaatgggatcctttatnnatcagttttagttacnatattattttctccaa

SEQ ID NO: 8267 - DNA, 253 bp, Homo sapiens
ccttatgaaggacattgtaggagccaatgagaaagaaatagccctaatgaatgctttgactgtaaatttacatcttctaatgttatcattttttaagcctacgccaaaacgatataaaattcttctagaagccaaagccttcccttctgatcattatgctattgagtcacaactacaacttcacggacttaacattgaagaaagtatgcggatgataaagccaagagagggggaagaaaccttaagaatagag

SEQ ID NO: 8268 - DNA, 510 bp, Homo sapiens
cactgtcaggaccaatttacttgatttttgaatactgttgctatggtgatcttctcaactatctaagaagtaaaagagaaaaatttcacaggacttggacagagattttcaaggaacacaatttcagtttttaccccactttccaatcacatccaaattccagcatgcctggttcaagagaagttcagatacacccggactcggatcaaatctcagggcttcatgggaattcatttcactctgaagatgaaattgaatatgaaaaccaaaaaaggctggaagaagaggaggacttgaatgtgcttacatttgaagatcttctttgctttgcatatcaagttgccaaaggaatggaatttctggaatttaagtcgtgtgttcacagagacctggccgccaggaacgtgcttgtcacccacgggaaagtggtgaagatatgtgactttggattggctcgagatatcatgagtgattccaactatgttgtcaggggcaatgcccgtctgcctg

SEQ ID NO: 8269 - DNA, 486 bp, Homo sapiens
cgcgagcgccctgcagactgagggagagagagagaaagaggaggggaggaggaggaggattcagggaataggagctggggagcccttctgcgccacaggttcaagcgattctcctgcgtcagcctcctgaggagctgggactacagtgatatcagtatcaagataaaagtttggaatgggagaaaaattctcaaagcctgaaagaaaatctgtagttacttttggtgacgctgtccagttcccacaatgtatcattccttatctgaaactagacatcctctgcagccagaagaacaagaagtaggcattgaccccttgtccagttactctaacaagtctggaggagattcaaataaaaatggaagaagaacaagttctactttagactctgaagggacttttaattcctataggaaagaatgggaagaactatttgtaaacaacaattacttggcaacaataaggcagaaggggattaatgggcag

SEQ ID NO: 8270 - DNA, 362 bp, Homo sapiens
gtgtctcgtgggtgaatttgtaagtgatgtcctgctagttccagaaaagtgccagtttttccacaaagagcggatggaggtgtgtgagaatcaccagcactggcacacggtagtcaaagaggcatgtctgactcagggaatgaccttatatagctacggcatgctgctcccatgtggggtagaccagttccatggcactgaatatgtgtgctgccctcagacaaagattattggatctgtgtcaaaagaagaggaagaggaagatgaagaggaagaggaagaggaagatgaagaggaagactatgatgtttataaaagtgaatttcctactgaagcagatctggaagacttcacagaagcag

SEQ ID NO: 8271 - DNA, 496 bp, Homo sapiens
  unsure (412): n=A,T,C or G
  unsure (456): n=A,T,C or G
ctttcctgccagtgtcagaaaatcctatttatgaatcctgtcggtattccttggtatctgaaaaaaataccaaatagtaccatacatgagttatttctaagtttgaaaagtaaaaagaaattgcatcacactaattacaaaatacaagttctggaaaaaatatttttcttcattttaaaacttttttaactaataatggctttgaaagaagaggcttaatttgggggtggtaactaaaatcaaaagaaatgattgacttgagggtctctgtttggtaagaatacatcattagcttaaataagcagcagaaggttagttttaattatgtagcttctgttaatattaagtgttttttgtctgttttacctcaatttgaacagataagtttgcctgcatgctggacatgcctcanaaccatgaatagcccgtactagatcttgggaacatggatcttanagtcactttggaataagttcttatataaatacccccagcc

SEQ ID NO: 8272 - DNA, 508 bp, Homo sapiens
ctgccatctgggcatttgcaatgtccatgcatactcttgaagcagcattcaattctgttcccccttttcaatgtatggttcatggggtttggtatcttgataggactaaggaaggggaagctgtcataaaccaggaagggaaatatttaattggaaagaacaaggctgttcattcaaattgcatttcctacagatttatccaataatggacaagtcaagccgcacacgtcttgctctcattatctgcaatgaagaatttgacagtattcctagaagaactggagctgaggttgacatcacaggcatgacaatgctgctacaaaatctggggtacagcgtagatgtgaaaaaaaatctcactgcttcggacatgactacagagctggaggcatttgcacaccgcccagagcacaagacctctgacagcacgttcctggtgttcatgtctcatggtattcgggaaggcatttgtgggaagaaacactctgagcaagtcccagatatacta

SEQ ID NO: 8273 - DNA, 601 bp, Homo sapiens
  unsure (586): n=A,T,C or G
ctgggaagccacgagaatattgtgaacctgctgggggcgtgcacactgtcaggaccaatttacttgatttttgaatactgttgctatggtgatcttctcaactatctaagaagtaaaagagaaaaatttcacaggacttggacagagattttcaaggaacacaatttcagtttttaccccactttccaatcacatccaaattccagcatgcctggttcaagagaagttcagatacacccggactcggatcaaatctcagggcttcatgggaattcatttcactctgaagatgaaattgaatatgaaaaccaaaaaaggctggaagaagaggaggacttgaatgtgcttacatttgaagatcttctttgctttgcatatcaagttgccaaaggaatggaatttctggaatttaagtcgtgtgttcacagagacctggccgccaggaacgtgcttgtcacccacgggaaagtggtgaagatatgtgactttggattggctcgatatatcatgagtgattccaactatgttgtcaggggcaatgcccgtctgcctgtaaaatggatggcccccgaaagcctgtttgaangcatctacaccatta

SEQ ID NO: 8274 - DNA, 503 bp, Homo sapiens
cctggtagtgtgactacccggaataatcaggaaaggcatcaccaaggcagcagtagctgtgctgtgatcaaagaatgcacagggcttgtagctacaggagagagagaacagtggcaattccaggcagagggagtggcatgttcagcagcacaaggaggagagtggctgcccaggaaggaccctcaggagttctttccttgcagtaggggatggaggtggtgctaaggctggaagagagtgtgtggatccagattgcgaagcatttcaaatgccatgctagggagtttaaagatttttgccaaaatgaaatgatgtcaccagaaatagagcattacctgtctgcctggtgtgcattaggtggacagaagagggagacatagcaagtagaagactgttttaataaatagaccaggcaagaaattagatcttaactaaaagctcccaaatctttaggcatttcaggcatttctatgccagttggagactgggggaattccccgagg

SEQ ID NO: 8275 - DNA, 481 bp, Homo sapiens
gagcaattcctcgggaaaaaatatttagcatagcagtaaagactgataggatgcctcaaaattcttaagttcacacgtatttcttaacgaatatactttccattacaaggttctatattatagtttttaatgacaaacttattaaacatctgggaaaggtccacttccttaaacctcttctccaaatcaggaacaggttagattgacatatttaacaggtagatttaggcatggtgtaggaatcatatcacctgggatttgtggtataggcacatcttattgaaatgaatgttttatgactttacctgatgaaccattaaggactggacctgccgtttgaggacctgcattctagctgttgtgacaactgaccgaacgtctggcaccacactctcactaagaatttcactgatgaggcggtggtttctctggaaacgggcggtggctgtatgcttcattgaaaagccatcatcataatctg

SEQ ID NO: 8276 - DNA, 516 bp, Homo sapiens
  unsure (35): n=A,T,C or G
  unsure (62): n=A,T,C or G
  unsure (78): n=A,T,C or G
  unsure (100): n=A,T,C or G
  unsure (159): n=A,T,C or G
  unsure (169): n=A,T,C or G
  unsure (188): n=A,T,C or G
  unsure (212): n=A,T,C or G
  unsure (223): n=A,T,C or G
  unsure (233): n=A,T,C or G
  unsure (250): n=A,T,C or G
  unsure (274): n=A,T,C or G
  unsure (301): n=A,T,C or G
  unsure (311): n=A,T,C or G
  unsure (313): n=A,T,C or G
  unsure (329): n=A,T,C or G
  unsure (341): n=A,T,C or G
  unsure (356): n=A,T,C or G
  unsure (364): n=A,T,C or G
  unsure (382): n=A,T,C or G
  unsure (412): n=A,T,C or G
  unsure (419): n=A,T,C or G
  unsure (421): n=A,T,C or G
  unsure (464): n=A,T,C or G
  unsure (465): n=A,T,C or G
  unsure (489): n=A,T,C or G
  unsure (508): n=A,T,C or G
ccccccccttttttttttttttttttttttttttnaaaaaaaggattttaggtttctttggngaaacaaaagcagatntaaaaagttacaaagattttanattttcattcacaaaaaaagtcattcacattttacactatacacgttatgatataaatncaggaaagtnttatgtgcattgtaaaganaaaggaaaaatagaaacctactanatcaacacagngttgttctgngctctaaaatacctaangggggattacatttaatgcaacanccaagggaacctgcttaaacatactgngtattattgnanctagagtcattccttntaagccaaaggnggttttataaaaaanaatcaatnttgggccaatccctttgngccctttttctctttttctatgggcatttnatttttngnctactcttcttcaagttgctctaaactgaaattagggaaggannctcactttccattacaggtttttntttaaacattaaattaagnggataagg

SEQ ID NO: 8277 - DNA, 489 bp, Homo sapiens
tgacagtgcaacatcttaaccaagaagtaaatatgacctcagtgtcctataaataatgtaagagcaggatttgaaacttggagagctgttttctcatttcatgtacacttgccccaaattgtctttgaagtcgtgtgcattgcacgttggatgagccagggaaattattacattaacaagcattttgtgtgtgcgtagtagttactttgtactgagagaacttgctttggggtgcaattaaacaataaactgattttatttgggagaaacaaggaagggtgcacttaactagcaacctaagcatgatttttcagcttttgcccttagggtttaaattacaattccaaaatgttagacatactgtattttttcgttcagtgtggctttaattttcccctcttgcagtttgttctgtaatgccttttacatttggacacatagtttatgctttttagattttggttgctttcttgccaaaataagtgttaa

SEQ ID NO: 8278 - DNA, 449 bp, Homo sapiens
  unsure (370): n=A,T,C or G
  unsure (388): n=A,T,C or G
cctggctcaacaaaagggctggggattggccctgaaaggagagagctgactgtcctggctgatggacaggagatcctcttagcactaccctaaggcaggcagttgggcattggtgtagacaacaggaaagtccaggctatagccgtactcaaaaacctttctgttccctttctgccagccctagggattgagtccacattcagcacaggactctctgggtacagctctctttaggaagacacaaattgcatggtgaagtcagttatatcctggccgcctttggtccctcccaggaagacgggcatgttttctgcttgagaggtgctgatgtaccagttggggaactgggcagactcaaattccagcttgntattgatttctatcttgntgaagacaaatcgcttttccatcttcttctttgggtaatttttgggatctacactctccag

SEQ ID NO: 8279 - DNA, 493 bp, Homo sapiens
cttatttctcttgtcctttcgtacagggaggaatttgaagtagatagaaaccgatctggattactccggtctgaactcagatcacgtaggactttaatcgttgaacaaacgaacctttaatagcggctgcaccatcgggatgtcctgatccaacatcgaggtcgtaaaccctattgttgatatggactctagaataggattgcgctgttatccctagggtaacttgttccgttggtcaagttattggatcaattgagtatagtagttcgctttgactggtgaagtcttagcatgtactgctcggaggttgggttctactccgaggtcgccccaaccgaaatttttaatgcaggtttggtagtttaggacctgtgggtttgttaggtactgtttgcattaataaattaaagctccatagggtcttctcgtcttgctgtgttatgcccgcctcttcacgggcaggtcaatttcactggttaaaagtaagagacag

SEQ ID NO: 8280 - DNA, 422 bp, Homo sapiens
ccgcctgctactgagtaaggggcattcctgttacagaccaaggagaactggagaaagaaagagaaaatcagttcgtggttgcattgtggatgcaaatctgagcgttctcaacttggttattgtaaaaaaaggagagaaggatattcctggactgactgatactacagtgcctcgccgcctgggccccaaaagagctagcagaatccgcaaacttttcaatctctctaaagaagatgatgtccgccagtatgttgtaagaaagcccttaaataaagaaggtaagaaacctaggaccaaagcacccaagattcagcgtcttgttactccacgtgtcctgcagcacaaacggcggcgtattgctctgaagaagcagcgtaccaagaaaaataaagaagaggctgcagaatatgctaaacttttgg

SEQ ID NO: 8281 - DNA, 521 bp, Homo sapiens
ccacactctacttctgcttctgccacctatggggtcgaggcaggtgtggtgccttggctaagtccacagacttctgagaggcccacgctttcttcttctccagaaataaaccctgaaactcaagcagctttaatcagagggcaggattccacgatagcagcatcagaacagcaagtggcagcgagaattcttgattccaatgatcaggcaacagtaaaccctgtggaatttaatactgaggttgcaacaccaccattttcccttctggagacttctaatgaaacagatttcctgattggcattaatgaagagtcagtggaaggcacggcaatctatttaccaggacctgatcgctgcaaaatgaacccgtgccttaacggaggcacctgttatcctactgaaacttcctacgtatgcacctgtgtgccaggatacagcggagaccagtgtgaacttgattttgatgaatgtcactctaatccctgtcgtaatggagccacttgtgttgatggttttaacac

SEQ ID NO: 8282 - DNA, 285 bp, Homo sapiens
  unsure (240): n=A,T,C or G
  unsure (262): n=A,T,C or G
cggaggaaaaggttggggaacagctaaataggttgttgttgatttggttaaaaaatagtagagggatgatgctaataattaggctgtgggtggttgtgttgattcaaattatgtgttttttggaaagtcatgtcagtggtagtaatataattgttgggacgattagttttagcattggagtaggtttaggttatgtacgtagtctaggccatatgtgttggagattgagactagtagggntaggcccaccgctgcttcgcangcggcaaagactagtatggcaat

SEQ ID NO: 8283 - DNA, 310 bp, Homo sapiens
ccaacattaaaaaaaaaaaaaagtaagacaattgccctggaatcccatccccctcacacctccttggcaaagcagcaggagtgctaactagctagtgcttcttctcttatactgcttaaatgcgcataattagcagtagttgatgtgcccctatgttagagtagaatcccgcttccttgctccatttgcattactgcaggagcttctaactagcctgaattcactctcttggactgttaatgtgcatacttatatttgctgctgtacttttttaccatgtaaggaccccacccactgtatttacatccca

SEQ ID NO: 8284 - DNA, 535 bp, Homo sapiens
  unsure (473): n=A,T,C or G
  unsure (475): n=A,T,C or G
  unsure (497): n=A,T,C or G
ctggctctggcatgaattttatttttaaataatttgttatttaaaatgaattactgaggggacagcccggctctctcttcatgattgttaccgcaactatatacaacagtttgctttccagattcaatttcgctttttctacattagatataaaagggggtaggttgaaagaggggagggtaaaataaaaaacataaacacacagacatacacatatcctggtttgggattttgcacccaataacttaaaaaaaaagtgttgcaaaaacttctgcccactctccacctgaggaacaccatgcatttgagaaacacggactctgtcacataaacggtgctgcctaaaacagtatggaggcggggaaggaagctagcaggggttggaattcattttgaaaaaagattgttttgttagaaaaagcaaaaacaaaaaagcattagaaagtgggagccactgcacagcagtagcctananactggctgcgatatggtagctntgccttgatatcatcttcgtgtcttcaggcatagagaa

SEQ ID NO: 8285 - DNA, 521 bp, Homo sapiens
  unsure (340): n=A,T,C or G
  unsure (508): n=A,T,C or G
gagcccgttaggcagagtttgcagtgagccaaaattgagccactgctctccagcctgggtgacagagcaagactccgtctctaaatagatagatgaatgaatgaatgaatgaatgaatgaatgcagggcggccaggtgcagtggctcatgcctgtaatcccagcactttgggaggccgagggcagatcatgaggtcaggagttcgagaccaccctgaccaacatggtgaaaacccgtctctacaaaaaatacaaaaaaaaaaaaattagccaggcgtggtggcacacgcctgggtgagagtgagattccacctcaaaaaaaaaaaaaaaaaaaaaaaaangccgggcatggcagtcctgtggtccgatactcgagaggctgaggcaggaatttcacttgagcccacatggttgaggctgcagtgagctgtgccactgcactacagcaagaccctgtctccccaaccaaaaaaagaaaataaatgttcgtataatttaaaaagaggccnggagttcaagacc

SEQ ID NO: 8286 - DNA, 500 bp, Homo sapiens
  unsure (25): n=A,T,C or G
  unsure (31): n=A,T,C or G
  unsure (39): n=A,T,C or G
  unsure (101): n=A,T,C or G
  unsure (366): n=A,T,C or G
  unsure (378): n=A,T,C or G
  unsure (396): n=A,T,C or G
  unsure (417): n=A,T,C or G
  unsure (462): n=A,T,C or G
aaaattgaaaaaaaaaaaaaaaaangctaancaaaaaanccaacttgttttccattaataaaagggggaacctgagtcacatgaggactggattgtcttanctacgtacttggcaatgtcactacacaaagaagaggaagtttggagaaggtctcagtgacataagggaaagttttatgtagggcaagactaaaagcagattgattacctaaaaaaagtttcctccctctaaagatgtttccgtaatcccttcctggctactcctggaataaccctaaattttgtatcaacaatcattagctcaaaatagagctgggcagaaaatacttccctaagattcttttatactcataagcatgtttttgnttttcattttgntttgttttgcactgaggngtatttgggtaaaatttccgngtgtgtcatgtgggactagtacagacttgggagcccaaggcttgntaatatcacttgatgctttcttggaggaccagtctact

SEQ ID NO: 8287 - DNA, 471 bp, Homo sapiens
ctgaagggtacagccatttcatagggtcctctcagagagtatttggtttgctttcctaactttctaaaaatagtagattacacaggccacctccatctcatggctcaagaactcagaaaaggctggactatggatttaagcaatacacaggacacattttattaaagaagtcaggattattacaagttttctaaatttttttccgtttactctgtgagagaatgcaaatgatctagcggttaatggcatggaaacctcataacgctcccaaatttcagaacttcaagcatgagtcatacagttactttaacagttttaaaatatgtttttgatctattttagccacaagactgaatacaagaggactgctatctgaagggaaggattctaaatactgtacaaagaatcacatgtgtcagttataaatatatacacacacacgtaagaaacatgttttttaacataaatgct

SEQ ID NO: 8288 - DNA, 449 bp, Homo sapiens; identical to SEQ ID NO: 8278
  unsure (370): n=A,T,C or G
  unsure (388): n=A,T,C or G

SEQ ID NO: 8289 - DNA, 464 bp, Homo sapiens
ctgccagtttggagcattgccctctaagagctttaaaactatttttttacatgccttatatacattccactaatgacattcttataataatattaaacacatgaccttggtactaacatactcactgtgaacccagcctattgcaaaaataaaatctttttataatattatctatgggatgtcagcacaatataacactctgggaagaagtggagttttttggttattaggttaattttctagtaaaacacattgcctgttttcagttaacactggtaatgccattttaatatatggctttttcaaatcagttcagtgaaaatagtacagatttaggtttacataactactctgacatactggaattgcatatagagatgttcagtggtcgtttttcattttaagtaatttttgttttggcatttttttgtgtgaagtaaattaatcaactagagaggtgcaaa

SEQ ID NO: 8290 - DNA, 384 bp, Homo sapiens
ccacaacgtcaatattcctggttaccctacattagagtatgcttccaaagctgtgtgcataacatggaattctttagagtagccattactgcattttcccaagggaaatttgcaagaattggatacatcagaatttaatcagaaactaaagccatgtcttttcccagaacatgccccagacgtggtttttaattttttgttgttgttattttggttttttaacgaatatggtttttaactgacctataagacagtccatttaaatatataaatttttaatagccttccaggggccatttcctaaatcccacctgagaggattaaatgagacaacgtagccaaaccccaggcattctccccttaagaaccttgtttggggaatgg

SEQ ID NO: 8291 - DNA, 295 bp, Homo sapiens
ctgtggtggtgccttctggagaagagcagagatacacatgccatgtacagcatgaggggctgccgaagcccctcaccctgagatgggagccatcttcccagtccaccatccccatcgtgggcattgttgctggcctggctgtcctagcagttgtggtcatcggagctgtggtcgctactgtgatgtgtaggaggaagagctcaggtggaaaaggagggagctactctcaggctgcgtccagcgacagtgcccagggctctgatgtgtctctcacagcttgaaaagcctgagacag

SEQ ID NO: 8292 - DNA, 506 bp, Homo sapiens
cagaagtaagcctcatcatcagagcctttcctcaaaactggagtcccaaatgtcatcaggttttgttttttttcagccactaagaacccctctgcttttaactctagaatttgggcttggaccagatctaacatcttgaatactctgccctctagagccttcagccttaatggaaggttggatccaaggagggtgtaatggagcatcaagccactcggcggcagcatggagctataactaagcatcctttagggttctgcctctccaggcatttagccctcacattagatctagttactgtggtatggctaatacctgtcaacatttggaggcaatcctaccttgcttttgcttctagagcttagcatatctgattgttgtcaggccatattatcaatgtttacttttttggtactataaaagctttctgccacccctaaactccaggggggaaaatatgtgccaatcaatagcacccctactcacatacacacacacctagccag

SEQ ID NO: 8293 - DNA, 512 bp, Homo sapiens
  unsure (503): n=A,T,C or G
cctttgcatgttaaagctgtataatttgttgggttgtgagtggtctgacttaaatgtgtattataaaatttagacatcaaattttcctactaactaactttattagatgcatacttggaagcacagtcatatcacactgggaggcaatgcaatgtggttacctggtcctaggtttgaactgtcttatttcaaaagatttctgaattaatttttccctagaatttctccttcattccaaagtacaaacatactttgaagaatgaaacagattgttcccatgaatgtatgctcatactcgactagaaacgatctatgttaaatgactgtgtatatgaattatttcaagtactaccccaaataactttcttattgctctgaaagaagaaaagcaatgtaaatcactatgattattgcacaaacaaccagaattctccaacaattttaagtaatctgatcctcttcttggagaaaattgttacctaatagtttttccttatgaatgntattactac

SEQ ID NO: 8294 - DNA, 383 bp, Homo sapiens; identical to SEQ ID NO: 7947

SEQ ID NO: 8295 - DNA, 467 bp, Homo sapiens
  unsure (3): n=A,T,C or G
  unsure (7): n=A,T,C or G
  unsure (11): n=A,T,C or G
  unsure (17): n=A,T,C or G
  unsure (21): n=A,T,C or G
  unsure (29): n=A,T,C or G
canaaanttanctggtntggnggtgcacncccgtagtcccagctacttgggaggctgagacaggagaatcgcttgaacccaggaggcggaggttgcagtgagtggagactgagccactgaactccagcctgggtgacaaagtgagactctgtctcaaaacaaaaaacaaaaaacaaaaaaagaattagccaggcgtggtggcatgcgtctgtagttccagctacttgggaggctgaggcaggagaatgtcatgaacccaggaggtggaggttgcagtgagccaagattgcgccactgcactccagcctgggtaacagaatgagactccgtctcaaaaaaaaaaaaaaaaagaggaatgagaacatgtgaccacacaaagttttgtttatgaatgttcataataattttgtttttaatagccaaaaactgaaaataacccaactgcgcaacaatggttgaatggataa

SEQ ID NO: 8296 - DNA, 506 bp, Homo sapiens
  unsure (468): n=A,T,C or G
cctgccttaccgagagccaaacagagcccagggagactccgctgtgggaaacctcattgttctgtacaaagtactagctaaaccagaaaggtgattccaggaggagttagccaaacaacaacaaaaacaaaaaatgtgctgttcaagttttcagctttaagatatctttggataatgttatttctattttttatttttttcattagaagttaccaaattaagatggtaagacctctgagaccaaaattttgtcccatctctaccccctcacaactgcttacagaatggatcatgtcccccttatgttgaggtgaccacttaattgctttcctgcctccttgaaagaaagaaagaaagaagactgtgtttttgccactgatttagccatgtgaaactcatctcattacccttttctgggtttgaagctgctgtctctagaagtgccatctcaattgtgctttgtatcantcagtgctggagaaatcttgaatagcttatgtacaaaa

SEQ ID NO: 8297 - DNA, 477 bp, Homo sapiens
  unsure (463): n=A,T,C or G
  unsure (470): n=A,T,C or G
ctgctttccccagaccagggggtccaatggctgcaatgtacccaaatggaatgttgcccccttaaacaccattttccctccaggaccaccttggtttctaggcactgtggttcttggcaggggctgtcttaggtaaaagggtagttgtggagctacagtctgaagaacatagcttgggctcaagttcaaatgagccatctttttcctttgcgtttttcttgactgaaggtgagatgttatttgtggcatgtgaactgtggcaggtgggaataatcctgcccttgagagaaaggatctccagcctcccagaagcctgctgtgctttcgtcccacagctttctgcccattgtttcttactagtttcttgaattgttcttgtggacttttcctcagggatacattggcctgcaggtcccagttcacatgtagtcccctgctcaccattggagaatcagctcactgntctctanaaacgtg

SEQ ID NO: 8298 - DNA, 546 bp, Homo sapiens
  unsure (472): n=A,T,C or G
  unsure (494): n=A,T,C or G
  unsure (504): n=A,T,C or G
ctgtcaacctttctttaactgaggaaacatttgagggctctgctgatgttctggctagctacactcaggcaacacatgatgaatcaatgacttatgaagatagaagccaactagatcacatgggctttcacttcacaactgggatccctgctcctagcacagaaacagaattagacgttttacttcccacggcaacatccctgccaattcctcgtaagtctgccacagttattccagagattgaaggaataaaagctgaagcaaaagccctggatgacatgtttgaatcaagcactttgtctgatggtcaagctattgcagaccaaagtgaaataataccaacattgggccaatttgaaaggactcaggaggagtatgaagacaaaaaacatgctggtccttcttttcagccagaattctcttcaggagctgaggaggcattagtagaccatactccctatctaagtattgntactacccaccttatggatcanagtgtaacanaggtgcctgatgtgatggaaggatccaatcccccatattaca

SEQ ID NO: 8299 - DNA, 326 bp, Homo sapiens
ctgagaccaaaattttgtcccatctctaccccctcacaactgcttacagaatggatcatgtcccccttatgttgaggtgaccacttaattgctttcctgcctccttgaaagaaagaaagaaagaagactgtgtttttgccactgatttagccatgtgaaactcatctcattacccttttctgggtttgaagctgctgtctctagaagtgccatctcaattgtgctttgtatcagtcagtgctggagaaatcttgaatagcttatgtacaaaactttttaaattttatattattttgaaactttgctttgggtttgtggcaccctgg

SEQ ID NO: 8300 - DNA, 512 bp, Homo sapiens
ctgcctttcctgggagccactttgattccactgaacgcccttcctgccctttccacttttggttccaaagccctccctagtttccatcagaggttctacaacatgaaaataagtcccacctcacagatttgttccacgtaacatgcccctactgatggtcattggattactctcttccattgcaaaataaattcagaatcagacttttctggggttgaattttattcctgactgtgacatgagctaggaaaagtcagttcacctctctgagagtgttttcccatacttgaaattgggggggagagataaagtcaataatcattagcattattacggggataaaataagctaatttgtgtaaagtgtttaatgtgatgcctggaaaagcataagtgcttgacaaagagtagctattactggggcaattattatgacttttgttatcatcgttattgaaaacttattgcttgagcacaatctgggctaagtaggaaactaagtgaatgtgatgc

SEQ ID NO: 8301 - DNA, 580 bp, Homo sapiens
ctggtgagaggaggagttagagctggtcgttttgtgattacccataatattggaagcagcctgagggctagttaatccaaacatgcatcaacaatttggcctgagaatatgtaacagccaaaccttttcgtttagtctttattaaaatttataattggtaattggaccagttttttttttaatttccctctttttaaaacagttacggcttatttactgaataaatacaaagcaaacaaactcaagttatgtcatacctttggatacgaagaccatacataataaccaaacataacattatacacaaagaatactttcattatttgtggaatttagtgcatttcaaaaagtaatcatatatcaaactaggcaccacactaagttcctgattattttgtttataatttaataatatatcttatgagccctatatattcaaaatattatgttaacatgtaatccatgtttctttttcaaatctaaagttaaaaaaaaaatagcagaagccagtgtcttaaagtctatcttttgtttctaagaccatgggatttcataatctcaagataaaatatgtatgaag

SEQ ID NO: 8302 - DNA, 457 bp, Homo sapiens
  unsure (417): n=A,T,C or G
ctggtcctaacttttatacaaagtgaaactatatagagctcctttgccaacataaggagctacataatttctattacacttgcctaggcatgagaaacgcaaaagcaactcaaaaggagcaagtccaggaaaagaaaagctatgaaggagagaaagactagcagatgaaacacatactctgaaaaactccaatctgccattcaagtattggaaataccccaaaggggacaatgaatgggatctattacaacaaagtcagcaaagtaaaatgcaaatctcacacatgataaatggccctgataggctgtttgctgaaagacctaaggctagtgattcagtccacaattccttctggaccctaaagaaggggttcatataaaagtcatacttgtctttttgcaattttctcttggttgncttcagagaatagtcatttgcttctttcattcaggttatg

SEQ ID NO: 8303 - DNA, 456 bp, Homo sapiens
  unsure (198): n=A,T,C or G
  unsure (293): n=A,T,C or G
cctatgtatggtggattacattttgcacatctcgacattgttttcattgtttccacaaaaattctgcctgtctcgtcagagtgctttgattaagcattactggttatggcaaacttgaactatataattgttatttgtattacaacatccatatggcttcttactatttttaaaattgttattaagagtgtacactangtatttgtgggttcatgtgagaaaataacaagcatttaaaaaactctttccatgaaaaaataaattctggattttccaacataactttaaaacanaattttgggatgcaaattattcataagctgcagtgtgacggtattcctgggaacataatggtatgttagagtctttactcaaaagcaagacacccagtgacaaggcacattcaagctcttctgttaagatcccgctcaagtgttttctcctttgtgaagtatt

SEQ ID NO: 8304 - DNA, 571 bp, Homo sapiens
  unsure (4): n=A,T,C or G
  unsure (5): n=A,T,C or G
  unsure (9): n=A,T,C or G
  unsure (17): n=A,T,C or G
  unsure (559): n=A,T,C or G
  unsure (560): n=A,T,C or G
aganntgtnatacgacncactatagggcgaattgggccctctagatgcatgctcgagcgctgagagatcccctcataatttccccaaagcgtaaccatgtgtgaataaattttgagctagtagggttgcagccacgagtaagtcttcccttgttattgtgtagccagaatgccgcaaaacttccatgcctaagcgaactgttgagagtacgtttcgatttctgactgtgttagcctggaagtgcttgtcccaaccttgtttctgagcatgaacgcccgcaagccaacatgttagttgaagcatcagggcgattagcagcatgatatcaaaacgctctgagctgctcgttcggctatggcgtaggcctagtccgtaggcaggacttttcaagtctcggaaggtttcttcaatctgcattcgcttcgaatagatattaacaagttgtttgggtgttcgaatttcaacaggtaagttagttgctagaacccatggctcctttgccgacgctgagtagattttaggtgacgggtggtgacaatgagtccgtgtcgagcgctgnntttttcggcct

SEQ ID NO: 8305 - DNA, 376 bp, Homo sapiens
cctaggtgtcggctgggcattgcctacacgtgaagagatcactccgcgtccccactgcacctgtcacaaagtgccttctgatatgcctggcaaaccaaaatcggtgagcgccagcttgcttccctagaagacatttctaaatattcataacatgcttgctcaaatcaatcaccttattttacatccgctccagggagaaatgaagacatggtcctacgttgttctgtaattattttctatgtaaattttgttccttgtcacaattatatatgtcttaggggaaaggaccatttcacatgtgtcacctcatgtgattctcaccacagccctgtgattgctcctgttttataaataatgacatagttccagttgatgg

SEQ ID NO: 8306 - DNA, 316 bp, Homo sapiens
ctgagactgcccagtataggaagaagcagaagatatgtaaggggtgttagggtaagcgtttgaagtaggaggagcaacaggctgctgaggtcgatacattgctgacccccctgttccgaagggatacggctgggctggttgataaggctgtggctgtggataaggtggtacctgggtgtgcatatgacctggagatgtgggaagctgaccagcagcatttggattaacatttccatgcattatgaaacccggaggtggaggattttctccatggggataatattgttgagtttgaactcttggcatctggtggtgg

SEQ ID NO: 8307 - DNA, 508 bp, Homo sapiens
  unsure (438): n=A,T,C or G
  unsure (444): n=A,T,C or G
ctgcacatggattggttaacataatatatactgctatataatcttttaagggctaatatttgtagataatttaaaagcatgtcaatttcctctaagatttgattatttaacctgcacaaaggccaatcttcagttatcaatgacaagaaaactctagggctgccaaaataacttcattttagaccccagagttagtgttaggctggtaatgtttctaatttgggaataatgagactagaaagctaggagggccccctccaaatttctcccttgtattaggctgaagtagaacataacgtggcttaaagcataaacttaaagcatatgctttgagttttaaaaatgttaacctgtaattaattattagagtattatccatagtctactatgatagtcagttaatattctctaaatcagattatattcatttgaaaatgnatttgnatatttgcaaatgtgttattacacaagatcttacctatgtcaatttaaagaggttaaagatgca

SEQ ID NO: 8308 - DNA, 378 bp, Homo sapiens
ctgggaggtaaatggtgactgtatttccaaagaagctcttttgattcagaactccaggagaccctgacatgaaaaccttaaagcaaatgactgtcacatgcttcaaggagtttatgtcaagacagttctacttatgtaaagtaagattataaaatgaaagagagtgtataaagaaaatcctaaggaatccactaaaaaacaactagaacgaagaggcaagttcagcaaggttgcaagatacaagacctatatataaaaatcaattgcatttctgtacacttgtaataaacaatcaaaaaaattaagaaaattacatttgcatttgcatcaaaaatagtaaaatatttacaagtaaatttaacaaaagaactgcaaaac

SEQ ID NO: 8309 - DNA, 297 bp, Homo sapiens
cctgggtatctgaggcttgcttggcttgtgtccatgcttaaacccacggaagggggagactctttcggatttgtagggtgaaatggcaattattctctccatgctggggaggaggggaggagggtctcagacagctttcgtgttcatggtggcttggctttgactctccaaagagcaataaatgccacttggagctgtatctggccccaaagtttagggattgaaaacatgcttctttgaggaggaaacccctttaggttcagaagaatatggggtgctttgctcccttggacacag

SEQ ID NO: 8310 - DNA, 437 bp, Homo sapiens
ccttgcttatccaagagtcaaaatggaaattaccacacctactacagttgcctgagaattataacaccatttttcagtactaccacagaaaaacctgtagtgtctgcaccaaggttcctaaagatcctgctgtttgccttgtgtgtggtacttttgtatgcctgaaaggactttgctgcaagcaacaaagttactgtgaatgtgtactgcactctcagaactgtggtgcaggaacaggtattttccttttgatcaatgcatcggtaattatcatcattcgaggtcaccgcttctgcctctggggttccgtgtatttggatgctcatggagaggaacaccgggatcttaggcgaggcaaacctctctacatttgtaaggaaagatacaaagttcttgagcaacagtggatttctcatacttttgatcacatcaataaa

SEQ ID NO: 8311 - DNA, 254 bp, Homo sapiens
ccagggagcctctactcattttgagaattcctttgagggttcatcatttgcagtgggtgacattgccctggcactgtactcagctctgttctcctactcaggctgggacaccctcaactatgtcactgaagagatcaagaatcctgagaggaacctgcccctctccattggcatctccatgcccattgtcaccatcatctatatcttgaccaatgtggcctattatactgtgctagacatgagagacatcttgg

SEQ ID NO: 8312 - DNA, 433 bp, Homo sapiens
ctgcttctgatttgcacccaaaatggcaccacccaaaaaaacacaacctatgtcgggttcggatttttaagaagttatttcagttaagcagacactaaagtacaattatacttggcttcttgtggcataaatgatcttgaattttaagatcatttggcttttacctatttagaacaaaacagtctatattttcctgtacttagaagttggaaatgaaataatttttaaagcccacaggagattaatttgtactaagtcattactatgtatcaggcattgtgcttggtgctttctagtcactgaaggagtattaaatatgtgaaatgcctgtcacagtgacttgcatgtggcaatcactcaaagatccccttctttaaccaatgtggtgaggttgtagtattattataaatttttaattatataacaactgagg

SEQ ID NO: 8313 - DNA, 449 bp, Homo sapiens; identical to SEQ ID NO: 8036

SEQ ID NO: 8314 - DNA, 515 bp, Homo sapiens
  unsure (500): n=A,T,C or G
ccaacatggtgaaaccccgtctctactaaaaatacaaaaaaattaggcaggcatggtggcacactcctataatcccagctactcggtaggctgaggcaggaggattgcttgagcccgggaggtggaggttgcagtgagccaagatcgtgccactgcactccagcctggctgacagagcgactctgactctaaataaataaatacatacatagatacatggtaacttagttccctctctttcttttgtattgacaccagatttactcaatactgttttagtttgtcagtccaataagatgagaaaataagtatgagatgcaacttggaattaaagtgatcaaatgtttgctctgacagataagcttcagcacctgttaacttggagaatcaagtgaaactccaccggcttcatgtggaagctcgtcaggcagcatcacaacatgtacataacccaagagccgttctgtacaaggttctccttaaaatataatgggaggccnggcgcggcggctcat

SEQ ID NO: 8315 - DNA, 442 bp, Homo sapiens
  unsure (354): n=A,T,C or G
attttgagtacattgaagagaacaagtatagcagagccaaatctcctcagccacctgttgaagaagaagatgaacacttcgatgacacagtggtttgtcttgatacttataattgtgatctacattttaaaatatcaagagatcgtctcagtgcttcttcccttacaatggagagttttgcttttctttgggctggaggaagagcatcctatggtgtgtcaaaaggcaaagtgtgttttgagatgaaggttacagagaagatcccagtaaggcatttatatacaaaagatattgacatacatgaagttcgtattggctggtcactaactacaagtggaatgttacttggtgaanaagaattttcttatgggtattctctaaaaggaataaaaacatgcaactgtgagactgaagattatggagaaaagtttgatgaaaatga

SEQ ID NO: 8316 - DNA, 140 bp, Homo sapiens
ctgtcactttgcgggggtagcggtcaattccagccaccagagcatggctgtaggggcgatctgaggtgccatcatcaatgttcttcacgatgacagctttgcgtccggagtagcgtccagccaggacaagcaccaccttc

SEQ ID NO: 8317 - DNA, 386 bp, Homo sapiens
catcggtgctgaaattgagcattttaaatagtacagtaggctggtatacattaggaaatggactgcactggaggcaaatagaaaactaaagaaattagataggctggaaatgcttactttctgctctcattttctttcattttgtctgctgtctttttgaatgccaatactttcatttaaaatgttttgggagcacggcaacccaaaatgactgaacggtggtccaaaaatccaaaccaactgataattacttctcgaggtgataggaaaggcacaggaagttaggactttggctgaaatgatgaaaacacatgttcgccattttagggatcagcgcctcgactcctgccacctccggctccaacgatgatcatgtttggatgtat

SEQ ID NO: 8318 - DNA, 451 bp, Homo sapiens
  unsure (14): n=A,T,C or G
  unsure (347): n=A,T,C or G
gaggtctgcagggncaggtctgcatagcagaggtcgccctccaggggctgcagtacctgctctggggacatcccggctgctttctgctggtacttcatcatcctccaagccaagagtgaggcggccaccaaaagcagcagcaatatggtgaagatgaggggcaggaggacactgagcttcaggagcttgtgcctgttgtccaagtggtggccggtcagagttggggagctgctagtttcttcttgggtgactggtgctgggtcaatggtcacttgaactgtgaccccaaggtcatttccagttttctcaattccacaccagtaagtgtcagcatcagttttcatganatcctccatggtcacagtgaacgtgcggtttttctgattgtccttgatggacacccggtccctcttcacctcctgctctgacccactggttttaacaaggatct

SEQ ID NO: 8319 - DNA, 280 bp, Homo sapiens
  unsure (221): n=A,T,C or G
  unsure (240): n=A,T,C or G
  unsure (242): n=A,T,C or G
  unsure (250): n=A,T,C or G
  unsure (254): n=A,T,C or G
  unsure (259): n=A,T,C or G
  unsure (270): n=A,T,C or G
  unsure (277): n=A,T,C or G
ccaccttatatataattatatattctaccataaatgctggccttcttcaaattatgattttggaaaatctaacccatacagagggataaaaaattgacatcccttggacaacttctccttgtttttttttgttttgttttgtttttaacattccaagctctctctggtcccctatccaaggagaaatgctagggcctcgaggatgtcgctatatatttttntaactaaatgataaatttntnttcaaatngttngaatncgtttccaaanctttcanagt

SEQ ID NO: 8320 - DNA, 308 bp, Homo sapiens
cctagagatcgttcagggtgttgtaactgggaacatctgaatgctgaggcttagtccagtgttctctctcccttaccactcctcttccccttccctctataatggcagtacccagggcccggtccatagactactatcgagtgctcctatgtgcatcttagtacgtatcattttcccttgcctttttccttctatcctttcagtggtagcaactgcccttgctaatcaccgtaacctcggctgagaaagaagaggaagcgaaatccaagatgcagctcagttcatcaaagcctagcaggtcccctcag

SEQ ID NO: 8321 - DNA, 556 bp, Homo sapiens
ctgtatacttactggtttagcatccctaatccaaaaacctataatttgaaatgtttcaataaacatttcctttgaatatcatgtgggcgctcacacagtgttggattttagagcatttcaaaattcgaatttttggattaaggattctcagcctgtaaacctagagttcttgactcaaatggactttcagtaccctttcctcaaccttcccacactcccgaccatacacatgtacctgcccacagacattcatacagtttccttattttaatgtcctgggaagaggtagaaacatcttgtcaaagtcactctttcagtggtgggcatctgcgctctaccatctggctgctcaaatgaaaatcgaaccttgcggaaaatttcctccacatcacaggaacaggcatattcttgcatatgttcaatgagtcttccaataaaaacagagcccattgtgggatgtctccaagaaacattatctggtgtggaagagcagaaagcgataaaatccttctctatgtgggctttcttaatagcatcatcctcaaactcttctgta

SEQ ID NO: 8322 - DNA, 192 bp, Homo sapiens
ttaaatgatgttttattagataaatttcaatcagggtttttagattaaacaaacaaacaattgggtacccagttaaattttcatttcagataaacaacaaataattttttagtataagtacattattgtttatctgaaattttaattgaactaacaatcctagtttgatactcccagtcttgtcattgccag

SEQ ID NO: 8323 - DNA, 494 bp, Homo sapiens
  unsure (434): n=A,T,C or G
gactcagactcctcatttgtaaattggaaatactttcgtatctttctaattcattgatgtgacaaactgagatagcacaaataaagcccttgcataaaacaattgatcaattaaatgtaactattgtaactatcaacattatcattttaaccaagtgaggtctgccaacaaggtattattacctccatttcatgaattaagacctgagcctcaaagcacttgaatgacttgcccacaatcacacaagtaaatggagacactggcttagactttggttttcactctcccagggagttcactgtcacatattgtgtgagttcatttaagcttctccaggagcctgctgatgatttctaaaaagtttatagagtccagaagaagactggggtctgacaatcccgtgagtagagaatgaatcagaaagaaatgtctanttttagttacagtcacttctgtggttccacaggctggaaaaatagcaattactttagtgt

SEQ ID NO: 8324 - DNA, 326 bp, Homo sapiens
ccagtggtgggttagaggcaggcaagggtgggagcagagatgggtgaatgggaggacatggggaaaccagtcagatggcatcacccattgggaggcagcatcttaccctttaaaaaacaaacatcagttgcatggaggaacagaaatattaagactatgtaatttaatctcaagaggttactagggtgtgctccaaatatattccgatgctgctgaaattaatcagaaagggaacagttcccagctactatcccatctgcctcaagtagaccaccctaattccttgatcctgtgcttcaagttgttagaaaaccattcaaaaaaag

SEQ ID NO: 8325 - DNA, 247 bp, Homo sapiens
cctctcccacttcgactgaggaggagcaggtgatgcttagaaatgaccaggacaccctcatggcccggtggacagggagaaacagccgatcttccctgcaggtggactggcacgaggaggagtgggagaaagtgtggctgaacgtggacaagagcctagagtgcatcattcagcgtgtggacaagctgctgcagaaggagcggctgcatggcgagggctgtgaggatgtcttcccctgtgcaggcag

SEQ ID NO: 8326 - DNA, 413 bp, Homo sapiens
ttggtcaccacagtgacagaaattgctggataagcgaagtgccactgggttctttgccctcccttcacaccatgggataaatctgtatcaagacggttcttttctagatttcctctacctttttgctcttaaaactgcttctctgctctgagaagcacagctacctgccttcactgaaatatacctcaggctgaaatttggggtgggatagcaggtcagttgatcttctgcaggaaggtgcagcttttccatatcagctcaaccacgccgccagtccattcttaaggaactgccgactaggactgatgatgcattttagctttgagcttttgggggttattctaccaacaaacagtccattggaaagaaaacagtccctggaattaacagatcagaatgttcacactggttaa

SEQ ID NO: 8327 - DNA, 426 bp, Homo sapiens
  unsure (40): n=A,T,C or G
  unsure (262): n=A,T,C or G
  unsure (407): n=A,T,C or G
ccggtgagttgggtgccggtggagtcgtgttggtcctcanaatccccgcgtagccgctgcctcctcctaccctcgccatgtttcttacccggtctgagtacgacaggggcgtgaatactttttctcccgaaggaagattatttcaagtggaatatgccattgaggctatcaagcttggttctacagccattgggatccagacatcagagggtgtgtgcctagctgtggagaagagaattacttccccactgatggagcccancagcattgagaaaattgtagagattgatgctcacataggttgtgccatgagtgggctaattgctgatgctaagactttaattgataaagccagagtggagacacagaaccactggttcacctacaatgagacaatgacagtgganagtgtgacccaagctgtgt

SEQ ID NO: 8328 - DNA, 178 bp, Homo sapiens
  unsure (8): n=A,T,C or G
  unsure (12): n=A,T,C or G
  unsure (15): n=A,T,C or G
  unsure (65): n=A,T,C or G
  unsure (74): n=A,T,C or G
  unsure (93): n=A,T,C or G
  unsure (108): n=A,T,C or G
  unsure (131): n=A,T,C or G
  unsure (132): n=A,T,C or G
  unsure (139): n=A,T,C or G
  unsure (142): n=A,T,C or G
  unsure (148): n=A,T,C or G
  unsure (160): n=A,T,C or G
  unsure (161): n=A,T,C or G
  unsure (165): n=A,T,C or G
  unsure (171): n=A,T,C or G
ccaatgancatntcntacagaaggaccccgaaagaccaccagtccacagagaatgtgtacttcangccctgtangatctcaggggcgatatantcaggggtgccgcancaaggtgctggcccggctctccnngaatatnttntctttncacatcccaaanncggnaatctngatgtgg

SEQ ID NO: 8329 - DNA, 269 bp, Homo sapiens
  unsure (38): n=A,T,C or G
  unsure (43): n=A,T,C or G
  unsure (68): n=A,T,C or G
  unsure (73): n=A,T,C or G
  unsure (76): n=A,T,C or G
  unsure (88): n=A,T,C or G
  unsure (105): n=A,T,C or G
  unsure (186): n=A,T,C or G
  unsure (187): n=A,T,C or G
  unsure (206): n=A,T,C or G
  unsure (221): n=A,T,C or G
  unsure (231): n=A,T,C or G
  unsure (260): n=A,T,C or G
  unsure (261): n=A,T,C or G
  unsure (265): n=A,T,C or G
gtaatcccttccttttactacattttaattaccagggncacanaaatataaatggaaaaaaaacttantgccnganaaagtaaagcgngtatagacattctgttntatttaaaaataaatatcacctcttacaattagtgttgaatttttggaagacaatttgtgagactttcaaaatttattgtnncaatattagtattctgatngtaattttatatganagctttgcanaacgttaacattgggagaaactgggcaanntgtnaagg

SEQ ID NO: 8330 - DNA, 328 bp, Homo sapiens; identical to SEQ ID NO: 8110

SEQ ID NO: 8331 - DNA, 431 bp, Homo sapiens
  unsure (319): n=A,T,C or G
  unsure (405): n=A,T,C or G
  unsure (426): n=A,T,C or G
agctggtccagcagctcgagcagtgggagttccgagtctgtggagtttttcttgttgattctcagttcatggtggagtcattcaagtttatttctggcatcttggcagccctgagtgccatgatctctctagaaattccgcaagtcaacatcatgacaaaaatggatctgctgagtaaaaaagcaaaaaaggaaattgagaaatttttagatccagacatgtattctttattagaagattctacaagtgacttaagaagcaaaaaattcaagaaactgactaaagctatatgtggactgattgatgactacagcatggntcgatttttaccttacgatcagtcagatgaagaaagcatgaacattgtattgcagcatattgattttgccattcaatatggagaanacctagaatttaaagaaccanaggaa

SEQ ID NO: 8332 - DNA, 366 bp, Homo sapiens
  unsure (252): n=A,T,C or G
  unsure (255): n=A,T,C or G
ccaacatggtgaaaccttgtctctactatttttacaaaagttagtcggacgtacagacgggtgcctgtagtcccagctacttgggaggctgaggcaggagaatttgtttgaacccagaggtgaaagttgcagggagccgaggttgtgccactgcactccagcctgggagacagagcgagactgtctccaaaacaaacaaacaaacaaacaaacaaaaaaaccctgtagcttgggatcagccttctcttctgntgnttttctttaaaaaataaaaattaaaaataggcttcaagtgatcctcccgccatgacctccaaaactgctgggattgtaggtgtgagcactgcacccagccgtatgtttttt

SEQ ID NO: 8333 - DNA, 395 bp, Homo sapiens
  unsure (370): n=A,T,C or G
ctggacaggttgattataccaaggcttgggaagagtactacaagaaaatgggtcaggcagttcctgctccgactggggctcctccaggtggtcagccagattatagtgcagcctgggctgagtattatagacaacaagcagcctattatgcccagacaagtccccagggaatgccacagcatcctccagcacctcaggtataattgccttcccagaccttccaccttaggttctgctgcaaaaagcaccagtgctgaagatgctgcaagcaccaaatcatagctcataaaatcaggtcctgagatagttacccataaagaggaatcctttgagtgtatgccattggtgagccgatgagcatggaccatanaagggctcaatgtagaaggtaaaat

SEQ ID NO: 8334 - DNA, 454 bp, Homo sapiens
  unsure (273): n=A,T,C or G
ctggtttcaaagatccccttctggcctctggaacagatggcgttggaactaaactaaagattgcccagctatgcaataaacatgataccattggtcaagatttggtagcaatgtgtgttaatgatattctggcacaaggagcagagcccctcttcttccttgattacttttcctgtggaaaacttgacctcagtgtaactgaagctgttgttgctggaattgctaaagcttgtggaaaagctggatgtgctctccttggaggtgaaacagcanaaatgcctgacatgtatccccctggagagtatgacctagctgggtttgccgttggtgccatggagcgagatcagaaactccctcacctggaaagaatcactgagggtgatgttgttgttggaatagcttcatctggtcttcatagcaatggatttagccttgtgaggaaaatcgtggcaaa

SEQ ID NO: 8335 - DNA, 346 bp, Homo sapiens
ctgactgtaacctccgcctcctgggttcgagattctcctgcctcagcctcccaagtagctgggattacgggcgcccgccaccacgcccggctaattttttgtatttttagtagagacagggtttcaccgtgttagccaggatggtctcgatctcctgaccttgtgatccacccacctcggcctcccaaagtgctgggattacaggcgtgagccactgcgcccggccacattcagttcttatcaaagaaataacccagacttaatcttgaatgatacgattatgcccaatattaagtaaaaaatataagaaaaggttatcttaaatagatcttaggcaaaataccag

SEQ ID NO: 8336 - DNA, 431 bp, Homo sapiens
  unsure (245): n=A,T,C or G
  unsure (272): n=A,T,C or G
  unsure (342): n=A,T,C or G
  unsure (344): n=A,T,C or G
  unsure (361): n=A,T,C or G
  unsure (383): n=A,T,C or G
  unsure (401): n=A,T,C or G
  unsure (430): n=A,T,C or G
cactactgtgggttttactccttgccggatattgatccaaaagaataattgaagcaatgaaactatagaatttatctccaggatgtggtcagcacacaatattcatgcctcctttgttaaataagagacgtgttttccaagtctaatgttgccaaaaagactacgtcagtgctttctgtggaatggaactcttatttcaacagtaagtctgaatcatgaccatttatttatttaacagatattgngacaataaattatctgccaggaactgngcaatgcattgctaattcaaagacaagacatagaccctctcttacaggacttctctctctggaggagcananaggcttgtaaatatacnataagtaaaaacataacaagtntgattagagaggaatgcntaaggagttgtagaagcagggatagagana

SEQ ID NO: 8337 - DNA, 336 bp, Homo sapiens
  unsure (238): n=A,T,C or G
  unsure (309): n=A,T,C or G
  unsure (310): n=A,T,C or G
  unsure (314): n=A,T,C or G
  unsure (319): n=A,T,C or G
  unsure (321): n=A,T,C or G
  unsure (334): n=A,T,C or G
ctgggagaggagcagagccctgggatgagactgattgattcagaccagatggatggcctcacataggtgtgacaaaaatagtaacacattgcagacattccaggaactgtcctcttctcctggcctggaggtgggtcgcctgtgttgtctccttatctacctcttatgtgcttccgaatcaaagaatgtcaatgatgctaactcttttccatgttagcacctggtcacaaggcatcanacttgaagttccattaaaaaagtctaatgaccattgcccaagtttccctgtaggtaaagccaaagcaaatnntttngcctncngcctaaatatgtngt

SEQ ID NO: 8338 - DNA, 370 bp, Homo sapiens
  unsure (66): n=A,T,C or G
  unsure (75): n=A,T,C or G
  unsure (89): n=A,T,C or G
  unsure (97): n=A,T,C or G
  unsure (107): n=A,T,C or G
  unsure (120): n=A,T,C or G
  unsure (156): n=A,T,C or G
  unsure (161): n=A,T,C or G
  unsure (177): n=A,T,C or G
  unsure (180): n=A,T,C or G
  unsure (197): n=A,T,C or G
  unsure (204): n=A,T,C or G
  unsure (207): n=A,T,C or G
  unsure (215): n=A,T,C or G
  unsure (220): n=A,T,C or G
  unsure (230): n=A,T,C or G
  unsure (239): n=A,T,C or G
  unsure (245): n=A,T,C or G
  unsure (261): n=A,T,C or G
  unsure (268): n=A,T,C or G
  unsure (272): n=A,T,C or G
  unsure (289): n=A,T,C or G
  unsure (294): n=A,T,C or G
  unsure (304): n=A,T,C or G
  unsure (309): n=A,T,C or G
  unsure (314): n=A,T,C or G
  unsure (354): n=A,T,C or G
  unsure (364): n=A,T,C or G
ccattgttgagcccagtgagagacatttctaccagccaatctggacactggtgggtgctggtgccnaacaattgncctcatctggtcgncccacggnaagtgtgatnccatctggtgtanaatggatcaaagctagagtgactgagttgaacccanacaanaactgcattcacacanatnacgacgaaaagatctcntaccganatnttattatngctcncggaatccanccacagcanctcggncctgagagcctgtcancccgtangtcngggcaaacaggttggcngcagncatcacatantccanatgcnggggattgttgacatcaaaggtgagcgggtgtggacagcntttgggcccngaccag

SEQ ID NO: 8339 - DNA, 230 bp, Homo sapiens
ctgcggaagcccagacaccaggaaggtgagatcttcgacacagaaaaagagaaatatgagattacggagcagcgcaagattgatcagaaagctgtggactcacaaattttaccaaaaatcaaagctattcctcagctccagggctacctgcgatctgtgtttgctctgacgaatggaatttatcctcacaaattggtgttctaaatgtcttaagaacctaattaaatagc

SEQ ID NO: 8340 - DNA, 525 bp, Homo sapiens
  unsure (392): n=A,T,C or G
  unsure (396): n=A,T,C or G
  unsure (461): n=A,T,C or G
  unsure (474): n=A,T,C or G
  unsure (524): n=A,T,C or G
caagacctttggaaagatgaaacctcgttatgaaatcaactccctgattagataccactgcaaagatggtttcattcaacgtcaccttccaactatccggtgcttaggaaatggaagatgggctatacctaaaattacctgcatgaacccatctgcataccaaaggacttattctatgaaatactttaaaaattcctcatcagcaaaggacaattcaataaatacatccaaacatgatcatcgttggagccggaggtggcaggagtcgaggcgctgatccctaaaatggcgaacatgtgttttcatcatttcagccaaagtcctaacttcctgtgcctttcctatcacctcgagaagtaattatcagttggtttggatttttggaccaccgntcantcattttgggttgccgtgctcccaaaacattttaaatgaaagtattggcattcaaaaagacagcngacaaaatgaaangaaaatgagagcagaaagtaagcatttccagcctatctaatttctttagnt

SEQ ID NO: 8341 - DNA, 486 bp, Homo sapiens
  unsure (361): n=A,T,C or G
gcagtgagccgagatcatgccgttgcaccccagctcaggtgacagcgtgagactctgatgcaaaaataaataaagaaataaaagaaaaggaagagagaaggcagcattagatggctgatgttatggcttcgtgaaacagtttatggcataaagaaataactccccaactccttagttttccaagtatgtaaatgtttctgctcatccaaacactagcataggtaagtgaggacacatatttcatctagcccaaatatattttttaaaagaatccctgcagattttttgcttctataaaaaatatcccaacccaaatttctaaaaattttgatttttggaattaaatgataatactaattancatttacctatacatccttttctattttaaaatcattgcataatctggcatttatatttaattttctaaatcattttccctagagagcattcatgtaattttagaacttggaaggaaccaggatt

SEQ ID NO: 8342 - DNA, 368 bp, Homo sapiens
  unsure (114): n=A,T,C or G
  unsure (223): n=A,T,C or G
  unsure (294): n=A,T,C or G
  unsure (298): n=A,T,C or G
  unsure (326): n=A,T,C or G
  unsure (346): n=A,T,C or G
  unsure (354): n=A,T,C or G
cctccaggcttctagagcagctagcttgggctggattctcacacccaggctgccccttggattgttctacccaagcttttccctggggtctgggctcactccataaggtaaggngccttttaccttatggtccttctttagcaggtaacaaaggagcatcaggggcaggctgccctggtggcatcacactggctagtgaggccgtgaatatcttgtcccccancagggccgacagtttctatcacagaaaacagtgtgttcagtggtgaaaatcgttgcatgcatgttttcatntgancgtgtccttctcccatactccctatcanccagccctgcctgtagctgntgtatggngattgcacttggac

SEQ ID NO: 8343 - DNA, 384 bp, Homo sapiens
  unsure (234): n=A,T,C or G
  unsure (289): n=A,T,C or G
  unsure (294): n=A,T,C or G
  unsure (304): n=A,T,C or G
  unsure (321): n=A,T,C or G
  unsure (331): n=A,T,C or G
  unsure (337): n=A,T,C or G
  unsure (344): n=A,T,C or G
agaaaaagggccgttctgccatcaacgaagtggtaacccgagaatacaccatcaacattcacaagcgcatccatggagtgggcttcaagaagcgtgcacctcgggcactcaaagagattcggaaatttgccatgaaggagatgggaactccagatgtgcgcattgacaccaggctcaacaaagctgtctgggccaaaggaataaggaatgtgccataccgaatccgtgtgcggntgtccagaaaacgtaatgaggatgaagattcaccaaataagctatatactttggntaccnatgtacctgntaccactttcaaaaatntacagacagncaatgnggatganaactaatcgctgatcgtcagatcaaataaagttattaaat

SEQ ID NO: 8344 - DNA, 508 bp, Homo sapiens
ctaatatcataaataaggttgtttaagacgtgcttcaaatatccatattaaccactatttttcaaggaagtatggaaaagtacactctgtcactttgtcactcgatgtcattccaaagttattgcctactaagtaatgactgtcatgaaagcagcattgaaataatttgtttaaagggggcactcttttaaacgggaagaaaatttccgcttcctggtcttatcatggacaatttgggctagaggcaggaaggaagtgggatgacctcaggaggtcaccttttcttgattccagaaacatatgggctgataaacccggggtgacctcatgaaatgagttgcagcagaagtttatttttttcagaacaagtgatgtttgatggacctctgaatctctttagggagacacagatggctgggatccctcccctgtacccttctcactgccaggagaactacgtgtgaaggtattcaaggcagggagtatacattgctgtttcctgttgggc

SEQ ID NO: 8345 - DNA, 273 bp, Homo sapiens; identical to SEQ ID NO: 7855

SEQ ID NO: 8346 - DNA, 555 bp, Homo sapiens
tggagacgacattgaaaatgaaattcttatctctggacttacagggagaccccagagagagtcaaccccttctgggcactgtgattgatgggatgctgctgctgaaaacacctgaagagcttcaagctgaaaggaatttccacactgtcccctacatggtcggaattaacaagcaggagtttggctggttgattccaatgcagttgatgagctatccactctccgaagggcaactggaccagaagacagccatgtcactcctgtggaagtcctatccccttgtttgcattgctaaggaactgattccagaagccactgagaaatacttaggaggaacagacgacactgtcaaaaagaaagacctgttcctggacttgatagcagatgtgatgtttggtgtcccatctgtgattgtggcccggaaccacagagatgctggagcacccacctacatgtatgagtttcagtaccgtccaagcttctcatcagacatgaaacccaagacggtgataggagaccacggggatgagctcttctccgtctttggggccccat

SEQ ID NO: 8347 - DNA, 479 bp, Homo sapiens
  unsure (431): n=A,T,C or G
  unsure (475): n=A,T,C or G
caagaggagatcggcgcggttgtcagctaaacctcctgcaaaagtggaagcgaagccgaaaaaggcagcagcgaaggataaatcttcagacaaaaaagtgcaaacaaaagggaaaaggggagcaaagggaaaacaggccgaagtggctaaccaagaaactaaagaagacttacctgcggaaaacggggaaacgaagactgaggagagtccagcctctgatgaagcaggagagaaagaagccaagtctgattaataaccatataccatgtcttatcagtggtccctgtctcccttcttgtacaatccagaggaatatttttatcaactattttgtaaatgcaagttttttagtagctctagaaacatttttaagaaggagggaatcccacctcatcccattttttaagtgtaaatgcttttttttaagaggngaaatcatttgctggttgtttattttttggtacaaccagaaaantagt

SEQ ID NO: 8348 - DNA, 487 bp, Homo sapiens
actaaacagccaatcatggtattcaaaggacaccgtaaagcagtctcttatgcaaagtttgtgagtggtgaggaaattgtctctgcctcaacagacagtcagctaaaactgtggaatgtagggaaaccatactgcctacgttccttcaagggtcatatcaatgaaaaaaactttgtaggcctggcttccaatggagattatatagcttgtggaagtgaaaataactctctctacctgtactataaaggactttctaagactttgctaacttttaagtttgatacagtcaaaagtgttctcgacaaagaccgaaaagaagatgatacaaatgaatttgttagtgctgtgtgctggagggcactaccagatggggagtccaatgtgctgattgctgctaacagtcagggtacaattaaggtgctagaattggtatgaagggttaactcaagtcaaattgtacttgatcctgctgaaatacatctgcaga

SEQ ID NO: 8349 - DNA, 275 bp, Homo sapiens
  unsure (13): n=A,T,C or G
  unsure (207): n=A,T,C or G
  unsure (211): n=A,T,C or G
  unsure (212): n=A,T,C or G
  unsure (231): n=A,T,C or G
  unsure (234): n=A,T,C or G
  unsure (242): n=A,T,C or G
  unsure (265): n=A,T,C or G
  unsure (266): n=A,T,C or G
  unsure (269): n=A,T,C or G
gaaaagtcccggntttaggtttcagaaacagaattttcccgaatgtttaaaatggtgaatggttccataaactgtgttaaccaggcttcttacaggctagtcccagaatctgaccaccatgtgcaatactgtttctaagaaaagtgtgctccaagcaagaaccttcaaacatttaacctgaatgaatgaatataacctcttcacggntcanngttttcataagcaaaacanganaatagcancattgatgtcttttaaaaaaaanntanggctgg

SEQ ID NO: 8350 - DNA, 519 bp, Homo sapiens
ctggcattggtctagagctttataaggccattcagcgagggaccatcaagtgcaactttgcgggggttgccttgggtgattcctggatctcccctgttgattcggtgctctcctggggaccttacctgtacagcatgtctcttctcgaagacaaaggtctggcagaggtgtctaaggttgcagagcaagtactgaatgccgtaaataaggggctctacagagaggccacagagctgtgggggaaagcagaaatgatcattgaacagaacacagatggggtgaacttctataacatcttaactaaaagcactcccacgtctacaatggagtcgagtctagaattcacacagagccacctagtttgtctttgtcagcgccacgtgagacacctacaacgagatgccttaagccagctcatgaatggccccatcagaaagaagctcaaaattattcctgaggatcaatcctggggaggccaggctaccaacgtctttgtgaacatggaggaggacttcatga

SEQ ID NO: 8351 - DNA, 252 bp, Homo sapiens
  unsure (215): n=A,T,C or G
caccgtcctgctcttccagttcgggatgaatgcaagttctagccggtttttcctacaaggaatccagttgaatacaattcttcctgacgccagagaccctgcctttaaagctgccaacggctccctgcgagcgctgcaggccacagtcggcaattcctacaagtgcaacgcggaggagcacgtccgtgtcacgaaggcgttttcagtcaatatantcaaagtgtgggtccaggctttcaaggtggaaggtgg

SEQ ID NO: 8352 - DNA, 495 bp, Homo sapiens
  unsure (10): n=A,T,C or G
  unsure (422): n=A,T,C or G
  unsure (454): n=A,T,C or G
tgctcttcanatacctgacatagcaaggaaagagtgtgctgaaattggtagtacgttattctgcagttctgggcagcttctttcctgtagagttttggagcacatctctgaaagtggatgggtctggtgcctgcacacctccgtggttccttttcctgagctccagctgtggctgtctgtcagagaagcacatttttctgcagataattagaatggcttcccccatctctcacggactgtcccaagtctagaaaagaattgagttcctcttctattagtcaaataaaagggaagagaatgtttgtcttcctttcctttctgtagtgttaagaaaataaacgaacttaatgattctaaattatcagtgagcttaacactgtactatagaccaaagattaccttttcaaaaagtcctttgaggngaaatattttgtatacgtaatacatagatgcncatataaacacacacatatagaatctcaatattttaacact

SEQ ID NO: 8353 - DNA, 457 bp, Homo sapiens
ctgagcacaggccctgcagtacctacacttgacttccaagaagggaaggggttgtgtagaaatcctgcatcctcttggcatgtggaatgttctctaggtatccttattccccacagaagggactctaggtccaattctctgtcttatgactgctaccttaaggccaatgagggattctgactttgggtgggaatgaacttgggtttttccctttattcctcagttgacaggtatatacagctctgaaaccagagaaacctgactagaaaactgactgtctgaaagatgtttatcccataaagtcaaggtcgcattttccatttgaaggatagtaatattcttatatcttttgaaatcagtgcagctaaaactggcttacagtaatcttgttttctggctatgaaagattctaaaaggtgaaatataattgtttaaggagagatattgatggacctcg

SEQ ID NO: 8354 - DNA, 545 bp, Homo sapiens
  unsure (75): n=A,T,C or G
ttctgagagtggcgtggccctcacttctgttctggtgaagaaaggtgatgtcaagcccttggctgagcaaattgntatcactgctgggtgcaaaaccaccacctctgctgtcatggttcactgcctgcgacagaagacggaagaggagctcttggagacgacattgaaaatgaaattcttatctctggacttacagggagaccccagagagagtcaaccccttctgggcactgtgattgatgggatgctgctgctgaaaacacctgaagagcttcaagctgaaaggaatttccacactgtcccctacatggtcggaattaacaagcaggagtttggctggttgattccaatgcagttgatgagctatccactctccgaagggcaactggaccagaagacagccatgtcactcctgtggaagtcctatccccttgtttgcattgctaaggaactgattccagaagccactgagaaatacttaggaggaacagacgacactgtcaaaaagaaagacctgttcctggacttgatagcagatgtgatgt

SEQ ID NO: 8355 - DNA, 552 bp, Homo sapiens
  unsure (500): n=A,T,C or G
ccattctattgtggcaaggctgagtagaagatcctaccccaattccttgtaggagtataggccggtctaaagtgagctctatgggcagatctaccccttacttattattccagatctgcagtcacttcgtgggatctgcccctccctgcttcaatacccaaatcctctccagctataacagtagggatgagtacccaaaagctcagccagccccatcaggactcttgtgaaaagagaggatatgttcacacctagcgtcagtattttccctgctaggggttttaggtctcttcccctctcagagctacttgggccatagctcctgctccacagccatcccagccttggcatctagagcttgatgccagtaggctcaactagggagtgagtgcaaaaagctgagtatggtgagagaagcctgtgccctgatccaagtttactcaaccctctcaggtgaccaaaatccccttctcatcactcccctccaaagaggtgactgngccctgcctctgtttgacaaacctctaacccaggtcttgacaccagacctgc

SEQ ID NO: 8356 - DNA, 345 bp, Homo sapiens
  unsure (4): n=A,T,C or G
atanaaaactaaagaaattagataggctggaaatgcttactttctgctctcattttctttcattttgtctgctgtctttttgaatgccaatactttcatttaaaatgttttgggagcacggcaacccaaaatgactgaacggtggtccaaaaatccaaaccaactgataattacttctcgaggtgataggaaaggcacaggaagttaggactttggctgaaatgatgaaaacacatgttcgccattttagggatcagcgcctcgactcctgccacctccggctccaacgatgatcatgtttggatgtatttattgaattgtcctttgctgatgaggaatttttaa

SEQ ID NO: 8357 - DNA, 377 bp, Homo sapiens
cacacggctcacattgcatgcaagtttgctgagctgaaggaaaagattgatcgccgttctggtaaaaagctggaagatggccctaaattcttgaagtctggtgatgctgccattgttgatatggttcctggcaagcccatgtgtgttgagagcttctcagactatccacctttgggtcgctttgctgttcgtgatatgagacagacagttgcggtgggtgtcatcaaagcagtggacaagaaggctgctggagctggcaaggtcaccaagtctgcccagaaagctcagaaggctaaatgaatattatccctaatacctgccaccccactcttaatcagtggtgggagaacggtctcagaactgtttgtttcaattgg

SEQ ID NO: 8358 - DNA, 462 bp, Homo sapiens
  unsure (458): n=A,T,C or G
ccactgtgtagcaccttctaattcaatttcatcggcagttgtaataacagttccagcctcaggtgttttaatggtgggaaacatcttgattgcttctccagaaacttgaccataggttttgttttggaaatcttggagaatctcagttccttccacagcaataagttctgtgggagaagcttccatttcttctaataactcaggtttaccatcatcttctgaaggttctaattttgtgtcaggagataaagagggaggctcagttatgtgaaggtattcctcacttgatggtttgaaagtcgcttcaatatttacatgaatttccttaaaagaatcctgtggggacattacagatgagccgacgtctattcctggcagagcactgggctgggggatctctgtgtgtccagaggcttcactgcctgagtagatagtgaggggagatgatggtgtctganaaga

SEQ ID NO: 8359 - DNA, 564 bp, Homo sapiens
  unsure (554): n=A,T,C or G
ctgccacaaaccaggtgaagctttgttctaagaatatttgtttcatctagtttatgagtccaaatgatatagactgtaaatgtcacagcagtggtgaaagactgctcggtcatgagcaccgacagtaactcactggcacgtgaatttctgaccgatgtcaaccggctttgcaatgcagtggtccagagggtggaggccagggaggaagaagaggaggagacgcacatggcaacccttggacagtaccttgtccatggtcgaggatttctattacttaccaagctaaattctataattgatcaggcattgacatgtagagaagaactcctgactcttcttctgtctctccttccactggtatggaagatacctgtccaagaagaaaaggcaacagattttaacctaccgctctcagcagatataatcctgaccaaagaaaagaactcaagttcacaaagatccactcaggaaaaattacatttagaaggaagtgccctgtctagtcaggtttctgcaaaagtaaatgttttttcgaaaaagcagacgacagcgtnaaattaccca

SEQ ID NO: 8360 - DNA, 457 bp, Homo sapiens
  unsure (283): n=A,T,C or G
  unsure (374): n=A,T,C or G
  unsure (394): n=A,T,C or G
  unsure (403): n=A,T,C or G
  unsure (423): n=A,T,C or G
  unsure (447): n=A,T,C or G
  unsure (448): n=A,T,C or G
ccaaaaacctgcactcagaaagaggtgatgtttttaggagaaattgaagaaatcttagatgtcattgaaccaacacagttcaaaaaaattgaagagccacttttcaagcagatatccaagtgtgtatccagttctcattttcaggttgcagaaagggcattgtacttctggaataacgaatatattcttagtttgattgaggagaacattgataaaattctgccaattatgtttgccagtttgtacaaaatttccaaagaacactggaatccgaccattgtancactggtatacaatgtgctgaaaaccctaatggaaatgaatggcaagcttttcgatgaccttactagctcatacaaagctgaaagacaganagagaaaaagaaggaattgnaacgtgaanaattatggaaaaaattagangagctaaagctaaagaaagctctnnaaaaacaga

SEQ ID NO: 8361 - DNA, 186 bp, Homo sapiens
ccacagcggcccttcacctcagctccccgggtcaatgcgatatcggcctgttctgtgatcagatctacgtagttgctggcccacacatcataaggtacaataaatttggctgcaaactctgccatgagacacgtcgtcccattttcccgcaccacaaatatatctttttcagggttagtggaaagg

SEQ ID NO: 8362 - DNA, 509 bp, Homo sapiens
ccattaaaaagcaagatgaacctattgatctcttcatgattgagatcatggagatgaaacataaatctgaaactgatacaagcttaatcagagggcttgttttggaccacggagcacggcatcctgatatgaagaaaagggtggaggatgcatacatcctcacttgtaacgtgtcattagagtatgagaaaacagaagtgaattctggctttttttacaagagtgcagaagagagagaaaaactcgtgaaagctgaaagaaaattcattgaagatagggttaaaaaaataatagaactgaaaaggaaagtctgtggcgattcagataaaggatttgttgttattaatcaaaagggaattgaccccttttccttagatgctctttcaaaagaaggcatagtcgctctgcgcagagctaaaaggagaaatatggagaggctgactcttgcttgtggtggggtagccctgaattcttttgacgacctaagtcctgactgcttgggacatgta

SEQ ID NO: 8363 - DNA, 445 bp, Homo sapiens
cccttggaagggcccccctctgtttgataatcaacaaatctttccccatcataggaaaataaaagaatgaagcaatgcctggaagaagaactgaaatcaagaagggacctagaaaagctggtgcggaggcttttgaagcaaacagatgagtgtattcgaggcgagtccagtagcaagacctcaattcttccataaccatcactgtgccactgggtggagtgtgccttcagggcatcttgaaatgtcccgctgaatgatttgactcagtttgctcacttctttggcttttgttttgtgtttgagtctctctctctctccctctctcttctctttctctccccgctgtgtgcatatgtgtgtgcgtgcacgtgcgcgcttgggcatttgctgttgtttggttattggttggttgttcattttttttttcaacaggtgaaaaagcagg

SEQ ID NO: 8364 - DNA, 321 bp, Homo sapiens
ccaggctggtctcgaactcttggcctcaggtgatccacccactttggcctcccaaagtgctggggttacaggcatgagcgacctcatgggtgtagattttgcgaacagataaaggtagatgatattgggctgctttgttgtcatcatctattctattccctctccttgagaagttctcatgaaacacttatacctcgatgtgagtcaccttaaatcgttttgggatgcggcaagcaacacataagttaatagccatcatgacaacccctgaagacacctgggctttggcactgggagcgtggtccaagtatggtagcgagg

SEQ ID NO: 8365 - DNA, 466 bp, Homo sapiens
gtaaaagatttggtatattcagaatgcatgtgatggaacacacacataggagttatgaaccaaggtgcaattaatttagatcagaagccatatattccagatggtctgatgaaaaagccaattaagtataaaatgaaaacttgctcaaaaaggcaattaattttccgttttaatttaattatttattgtgaaagatatatagttgacagtatgttgacctgtttttttctcctttcttgttttataatgtcatatcttcctgacatatgtgtttctctataaaatttgaataattgcactaaattaaatcctgctagttttgggagaaaaatctagtagggttctttttctaaggtggtgattataacagttatgcatattcaatgaatattcaattctgcttttcaaaataacctattaagttttaaagagtaattacattagctatattcactagtaaacattt

SEQ ID NO: 8366 - DNA, 186 bp, Homo sapiens
ctgccacaaccgccatgaccccagtggcagggtcagtgcccacaagggggttgcctgctttgactgaactaacctgtgggtttagtccaacgaacagatgtgcctgatttcagggctgaatttttgcttgaccacaagtctcgggcagaacagattcgcctatgactgaatcgactgaatggatgg

SEQ ID NO: 8367 - DNA, 337 bp, Homo sapiens; identical to SEQ ID NO: 4598

SEQ ID NO: 8368 - DNA, 401 bp, Homo sapiens
  unsure (359): n=A,T,C or G
  unsure (393): n=A,T,C or G
ccagcctggtctcgaactcctgatcttaagtgatccgcccatcttggcctctcaaagtgctgggattacaagcgtgagccaccgcacccagcagtaaaaataatactagtaattattaactacatttttaaaacatatgtgctctgagcaagactctgggccagggtctttcctgattattctcttgagtacttaccccagttctttgagttagacactaccgccctcatttttatgatgagttaagacagcaagtaacttgtctaagaacactcccttagtgaagtgtagagttaggattccaacccaatgtatgtgctgctgtgttatactttctaacactacaagtaacagcccanatggagagtgaggagggaggaaagcgttatttanggaccagg

SEQ ID NO: 8369 - DNA, 340 bp, Homo sapiens
  unsure (313): n=A,T,C or G
cgcgtcaggttataaatgaccctatctccttagttgtgtactctcgtgccaaaactgctggctgagtgtaccctttctgcaggaagtaaaaatggccttactaaataaatttatgttcaagtgctatttctttatggcaccggagaacaagcatttcaaacaatttggtggcaatccgtacggggatacattcttctctaggggcggtctccagtcctctctcatggggtagcgctcccctacttcattgcaaggtcctcataggtaagaaattgagacccacccggtgtgacgaataaacctgggctctcancaatgggggcaaaaaaaaaaaaactgg

SEQ ID NO: 8370 - DNA, 170 bp, Homo sapiens
gtcccgatcaaggtccagatcagttgacagtggcaattaaactgtaaataacttgccctgggggcctttttttaaaaaacaaaaaccacaaaaattcccaaaccatacttgctaaaaattctggtaagtatgtgcttttctgtgggggtgggatttggaaggggggttgg

SEQ ID NO: 8371 - DNA, 449 bp, Homo sapiens; identical to SEQ ID NO: 8036

SEQ ID NO: 8372 - DNA, 493 bp, Homo sapiens
  unsure (427): n=A,T,C or G
  unsure (472): n=A,T,C or G
ccattatagtaatagtcataaatcaaaataccaaacagatctttatgaaagagaaaggagtaaaaagagagaccgaagcagaagtccaaagaagtccaaagataaagaaaaatctaagtatagatgaaagatgaagaggcagaattgagaggctaacatatttactcttgtctaacttaagagtgccaggaaagcagatgcttagattttgtgtcaaagcttgttatttttttcatactaggattatggtctttagattaatactgattatatagagcacggaaagataaagaattgaacattttctttgtatacttttttacactaattttattgttatacataaatggtagtcttcatttttgaagtcttacattttcactctttttttaatgaagtatttcatactacaaaaatacataaacgnatatataaagggataataaatgtaaatatctgtgtactcatcagncagcttaagatacagatgttg

SEQ ID NO: 8373 - DNA, 481 bp, Homo sapiens
ccaggtgcgcaccctgtggcatgaccctcgtcacataggctggaaagatttcaccgcctacagatggcgtctcagccacaggccaaagacgggtttcattagagtggtgatgtatgaagggaagaaaatcatggctgactcaggacccatctatgataaaacctatgctggtggtagactagggttgtttgtcttctctcaagaaatggtgttcttctctgacctgaaatacgaatgtagagatccctaatcatcaaattgttgattgaaagactgatcataaaccaatgctggtattgcaccttctggaactatgggcttgagaaaacccccaggatcacttctccttggcttccttcttttctgtgcttgcatcagtgtggactcctagaacgtgcgacctgcctcaagaaaatgcagttttcaaaaacagactcagcattcagcctccaatgaataagacatcttccaagcatataaa

SEQ ID NO: 8374 - DNA, 114 bp, Homo sapiens
cgcgtatgtgaacttccagcagccggcggacgcggagcgtgctttggacaccatgaattttgatgttataaagggcaagccagtacgcatcatgtggtctcagcgtgatccatc

SEQ ID NO: 8375 - DNA, 462 bp, Homo sapiens
  unsure (366): n=A,T,C or G
  unsure (371): n=A,T,C or G
  unsure (387): n=A,T,C or G
  unsure (438): n=A,T,C or G
ctggtggttttcttcaggttccagcctctcttggcatctgctgccttgtttcctgtggaaacagcaagcagctctgcacggttcttctcatccttgccttgcagaagagcctgtttatttttgcctctgtcacttcctgaagaaatcagtgtattttcaatacagtgtggctcctttctcctaggttcagttaggtcgtgtttcctagcagtgtcactattcaagggttgagtccacgtcttgctctctggagaatgtcaatgtaatgtatttttcccatcgtacagagtctttgttgatttgcaaaatgttggatttggggttcatacccatattttttgttgtcatgggcatttaggtcatcantctgntctcttatttgcttgntcttttgttaattcattcccatggctatatgccagacacagcatgatgcanaaggaatacgacagaggatgacac

SEQ ID NO: 8376 - DNA, 368 bp, Homo sapiens
ccatgtaaataagatgatttaatgttgattttaatcctgtatataaaataaaaagtcacaatgagtttgggcatatttaatgatgattatggagccttagaggtctttaatcattggttcggctgcttttatgtagtttaggctggaaatggtttcacttgctctttgactgtcagcaagactgaagatggcttttcctggacagctagaaaacacaaaatcttgtaggtcattgcacctatctcagccataggtgcagtttgcttctacatgatgctaaaggctgcgaatgggatcctgatggaactaaggactccaatgtcgaactcttctttgctgcattcctttttcttcacttacaagaaagg

SEQ ID NO: 8377 - DNA, 497 bp, Homo sapiens
gtttgtgaaagatgtcttttcacctataggggagagactgggctgggaccccaaacctggagaaggtcatctcgatgcactcctgaggggcttggttctgggaaaactaggaaaagcaggacataaggcaacgttagaagaagcccgtcgtcggtttaaggaccacgtggaaggaaaacagattctctccgctgatctgaggagtcctgtctatctgactgttttgaagcatggtgatggcactactttagatattatgttaaaacttcataaacaagcagatatgcaagaagagaaaaaccgaatcgaaagagtccttggcgctactcttttgcctgacctgattcaaaaagtcctcacgtttgcactttcagaagaggtacgtccacaggacactgtatcggtaattggtggagtagctggaggcagcaagcatggtaggaaagctgcttggaaattcataaaggacaactgggaagaactttataaccgatacc

SEQ ID NO: 8378 - DNA, 329 bp, Homo sapiens
  unsure (303): n=A,T,C or G
gggagtagccaggctggatggctcaaatataaatgaatgaggaattctttatgaagtatcagtcagattttatgattaagtgatgtaatataggaattatgtaaaagggaagaatgtctgatactgatctattagagaggtactttagaggcttcttgattggcataaagttcctaaggttatagattttccccccttttggctgtatagcaaagtgttttaatccacggttgtgtcttattgttccattaaaattgtatcttcgatccatcaataaatacttgtggttgaatcaaaaaaaanaaaaaaaaaaaaaaaaaggcttgtac

SEQ ID NO: 8379 - DNA, 415 bp, Homo sapiens
  unsure (382): n=A,T,C or G
  unsure (410): n=A,T,C or G
gaggtatggatggatgaatagatagatgatggatggatggaggggtaatgaatagatggatgacttaaactttagcaaaaggaattcatctggaaaatcataaaaggtgagtctgatgcataatataagtgtgaggaagaaatggaatctgagtctggagaggtacactagacagacagaagcagatgagtgaaactcttggatagcatctttcttcaaattccttgaatatattaaataataaatttggaattatagagccctcattggaagaatataaaatttcaaattaaaaaactagggcatatgcatatccaactgcttttttaaaaaagaaaagaaaaggaactaagggcaaaaacatggctgtcagctttctctntatcttctcaattcttttcaaattctancccac

SEQ ID NO: 8380 - DNA, 571 bp, Homo sapiens
ccaccaacagtttcccagccacatgctgggccctctaggtctctccagcccactctaaggacccaagaaatgcagccacagtccatctctcttttttctctccttccgggggaccaaggtaccttctggggcatacaacatggcagcagggcctcgggaagaggggtaggaggaccgagcagcattctctgtagaggaagacaggaaaggagaccctcttggcacacatttatggagggttgtccctgaagagaagggcaggtgggagaggttccctgttacttaagagaaggcaccagtggcaaagagcacaatgaagaggatgatgataaaaacaatcacgcagataaggacaatcatcttcacgttcttccaccagaattttcgagccaccttctgcgatgtcgtcttgaagtgctcagatgtggcttccagatcctctgtcttgttgcggagatgttccaagttttccccccgggccaggatccgctccacattctgggtcataatattcttaactccctccacctcactttgcaggttccgcacacgatcatttcctccaccttca

SEQ ID NO: 8381 - DNA, 204 bp, Homo sapiens
  unsure (175): n=A,T,C or G
  unsure (197): n=A,T,C or G
ctgggatttcaaacagactgtcccattgtcaaacatttggtttgaaataaaaggactcttagtataactctgggccagaggggaagaaggggtgagggcagctagcgtggcaccctgggtccaactccaaccccttctgttgccagcaatgtgaccaaatacttacacctcccancaagtttctgtttctttaatgnaaatgta

SEQ ID NO: 8382 - DNA, 466 bp, Homo sapiens
  unsure (437): n=A,T,C or G
ccagcgacagcctggcctgggaatggactggcagctcatcactaaaatgactcctttcatggaatccactgttatgcagccacactgaccacagagcaactgaataggtgagcattggattgttgatgacaactcttcagcagaacaattgtgtgtttgaagggactgttttatgatgaaataactgttatttcctggagctaattgttgaatgacagtttgtcaactgtttaaatgaatttcatttgaattaacaattatacagccactcagaggtcctacattcgccagagttggcatccagttgatgggttcatttgaattaaatggtttggaggctaacgtgattttttaaattgaatttcatcactattctgtgtattctatttatcactattctaaatgactcatggttggctaattgattatcatgtaancaagctatttgaagaaattgattacatat

SEQ ID NO: 8383 - DNA, 255 bp, Homo sapiens
ccatgtcgtactactttgaccgcgatgatgtggctttgaagaactttgccaaatactttcttcaccaatctcatgaggagagggaacatgctgagaaactgatgaagctgcagaaccaacgaggtggccgaatcttccttcaggatatcaagaaaccagactgtgatgactgggagagcgggctgaatgcaatggagtgtgcattacatttggaaaaaaatgtgaatcagtcactactggaactgcacaaactgg

SEQ ID NO: 8384 - DNA, 182 bp, Homo sapiens
ccaatcaattctggaattacccacttgtttaattttgagcaacatgatctagcattaatgtaatcacattctaaatcagacaatgtaattatgaagtagaccgagaggaagatgagcgcgcaacaatcgaggagagagaagacgaacaccaccgcctccatcctcctcctccgtcgccgccg

SEQ ID NO: 8385 - DNA, 390 bp, Homo sapiens
  unsure (363): n=A,T,C or G
cctttatgttggggcctatgtggaaactctagccccgtgcttccattacatacaaaccgaatatattaaagctttagagtttttacaactatctatctttcccctgacatctccccagccaccttagaggtgggaaaggaaaggatataagaaaaccccactaaatgtggagtacatttcatcaaagtctgtgtgagccagcttgcccccagtcaccacgacgttgactgcatctcccgccttcaggtgcacgatgaggtggaatgcccccgggcccccgcaggtatgcaaagctcctggagggcggtggtattccaggaactctctcctgtacccagcggtatgcagacctgcccgggcggncactcgagccctatagtgagtcgtatt

SEQ ID NO: 8386 - DNA, 275 bp, Homo sapiens
  unsure (14): n=A,T,C or G
  unsure (138): n=A,T,C or G
  unsure (151): n=A,T,C or G
  unsure (153): n=A,T,C or G
  unsure (181): n=A,T,C or G
  unsure (197): n=A,T,C or G
  unsure (202): n=A,T,C or G
  unsure (210): n=A,T,C or G
  unsure (240): n=A,T,C or G
  unsure (247): n=A,T,C or G
  unsure (269): n=A,T,C or G
ctggtactctgcantggttttctctttgttgttcacaatcacagtacatttatatgtccctgagtcatagatccggacttcaggaataaaataactctctgtgctcttcatggaggagatgttgtaaaacagcacgtnatccttatagaanancatctggtgctgaggcttgacgtgagangtggtgctgacatccncgaancactgcanggtcaggttcttcccattttgcaccgtccngtccggnaggctcttcatgtcaacactgntgattg

SEQ ID NO: 8387 - DNA, 363 bp, Homo sapiens
cctctctcacctctcctactcacttaaagcccgcctgacagaaaccacggccacatttggttctaagaaaccctctgtcattcgctcccacattctgatgagcaaccgcttccctatttatttatttatttgtttgtttgttttattcattggtctaatttattcaaagggggcaagaagtagcagtgtctgtaaaagagcctagtttttaatagctatggaatcaattcaatttggactggtgtgctctctttaaatcaagtcctttaattaacactgaaaatatataagctcagattatttaaatgggaatatttataaatgagcaaatatcatactgttcaatggttctgaaataaactt

SEQ ID NO: 8388 - DNA, 334 bp, Homo sapiens
  unsure (8): n=A,T,C or G
  unsure (10): n=A,T,C or G
  unsure (14): n=A,T,C or G
  unsure (22): n=A,T,C or G
  unsure (27): n=A,T,C or G
  unsure (46): n=A,T,C or G
  unsure (51): n=A,T,C or G
  unsure (60): n=A,T,C or G
  unsure (86): n=A,T,C or G
  unsure (296): n=A,T,C or G
tgacagantncaancaaataanatagngatgctggtcaggcttggnggctnatgcctgtnttccctaaactttgggagcctaaggngagaactccttgaactcctaaggccaggagttcaagaccagcctggataacatagcaagaccccatctctacaaaaaaccaaaaccaaacaaacaaaaatgatagtggtgcttccctcaggatgcttgtggtctaatgggagacagaacagcaaagggatgattagaagttggttgctgtgagccaggcacagtgctgatataatcccancgctatgggaggctgaggtgggtggatcatttgaggcc

SEQ ID NO: 8389 - DNA, 478 bp, Homo sapiens
  unsure (378): n=A,T,C or G
  unsure (414): n=A,T,C or G
ccagcgacagcctggcctgggaatggactggcagctcatcactaaaatgactcctttcatggaatccactgttatgcagccacactgaccacagagcaactgaataggtgagcattggattgttgatgacaactcttcagcagaacaattgtgtgtttgaagggactgttttatgatgaaataactgttatttcctggagctaattgttgaatgacagtttgtcaactgtttaaatgaatttcatttgaattaacaattatacagccactcagaggtcctacattcgccagagttggcatccagttgatgggttcatttgaattaaatggtttggaggctaacgtgattttttaaattgaatttcatcactattctgngtattctatttatcactattctaaatgactcatggntggctaattgattatcatgtaagcaagctatttggaagaaattgattacatatatttatatata

SEQ ID NO: 8390 - DNA, 554 bp, Homo sapiens
ctgcaaagttaatagccagtatagtgtttggggaaacactataagctattaccaaaaaatcctctgtgagagggtgttagttggatgtcacataacataaatgatgtactgtgtggaagaacagttgttgtattgtgtattgtgggatttgtttttagatgaaaccgttaatgtatgtagtaggaattaacttttacataggtgaagtacaaatagagaagtgatagtgatttttttctctttatcaccaaaatcttatattgctaaagaatgaattttccctctcagaaaacactacattatcctaatttctttactttttaatcttgctattcaacagaaaaatatcctgttgcattcttcttttccaagtatgtcttaaataacggtagccccctgctcttccattttaactttagagtcagcatgtcatttgccattaacgaaaaccaaaacaaaacaaaaactaaagaaaaccaaactaagaggatatctacagaaatttcattgaatgtattaatgccagttactccacaaactggcctattattatt

SEQ ID NO: 8391 - DNA, 444 bp, Homo sapiens
  unsure (124): n=A,T,C or G
  unsure (182): n=A,T,C or G
  unsure (184): n=A,T,C or G
  unsure (249): n=A,T,C or G
  unsure (334): n=A,T,C or G
  unsure (396): n=A,T,C or G
cttttttttttttttttttttttggaaacagggttttgctctgttgcccaggctggagtgcagtggtgcaatctcactgcagcctccacttcctggctgcaagcaatcctccaagcacagcctntcgagtagctgggactacaggcatgtgccacttgtctggctaattttattttttgtananatgaggtctcactatgctgcccaggctggtctcaaactactgggtttaagcgatcctcccacctnagcctcccaaaatgttgggattacaggcgtgagccaccatgcctagccggtaatctcttttttagtgaaaaaaattgaggtttanaaagtttaagtaacttgaccaaggtcgtacagctaatgagtaggagggcgagctggagctanaatccaaatcacagttctggtcttaaaacctccttatttccattaata

SEQ ID NO: 8392 - DNA, 474 bp, Homo sapiens
gggagatcagcactctctccccaatttatgttctcaatgggcatatgttgtttagaccaccaaaaatcaaggttagacatcctcagatgattgcaccaccctaaagccttacctccatttcaccgaaggagtcaccgccccccacaactgtcacacccaccagtgcaacccactactcatctctattactatccctacctctagcaactctaaccccaccttaggtgcttctatggtctaggagaaaatgccgttagaaaggactctacaggcttctttgaaatgcgctttgtttcttccccgctatcctctattgttaccccttccccaagcccatccaatcaaaccatctaccatttcatgcccaatgacaaaaccaaagtagttataataaaagtcaaggatttaaaacaaactttagccataacaactgggtaccaagatataaatgcctggctgaaatggattaaatat

SEQ ID NO: 8393 - DNA, 444 bp, Homo sapiens
  unsure (422): n=A,T,C or G
  unsure (440): n=A,T,C or G
ccactagaggtctgtgtgccattgcccaggcagagtctctgcgttacaaactcctaggagggcttgctgtgcggagggcctgctatggtgtgctgcggttcatcatggagagtggggccaaaggctgcgaggttgtggtgtctgggaaactccgaggacagagggctaaatccatgaagtttgtggatggcctgatgatccacagcggagaccctgttaactactacgttgacactgctgtgcgccacgtgttgctcagacagggtgtgctgggcatcaaggtgaagatcatgctgccctgggacccaactggtaagattggccctaagaagcccctgcctgaccacgtgagcattgtggaacccaaagatgagatactgcccaccacccccatctcagaacagaagggtgggaagccaganccgcctgccatgccccanccag

SEQ ID NO: 8394 - DNA, 59 bp, Homo sapiens
  unsure (48): n=A,T,C or G
  unsure (51): n=A,T,C or G
cggccgaggtcccccccccctttttttttttttttttttttttttttnttnagggaagt

SEQ ID NO: 8395 - DNA, 334 bp, Homo sapiens
cctaggcacagaggagcaggttagggcacattcaccttctcaggattctgtggctccctcattggagaagggagacagcatcttgggggcgcaattccaagagcagcgagggcagaggttagagatggctgagagcccctaacctgaggcggcaccacaataggcagcaacaactgtgtggaaagctggatgaactggtcagtagcggaaaatgggagggggcactgggttggcctcttggggaggggtccaaccttggcttggatgagctcatgagaatacccagtgttcccaagcagaggggggcagagcccaaagcccctttctctgcagg

SEQ ID NO: 8396 - DNA, 564 bp, Homo sapiens
ccagtggggcagcccttccccattggggtttccattgcgagcaaagttggcccagaatttcatcaccatcttgctaagtctgatctcctcttctgaggcaccctcttttaaaaatggggccccaaagacggagaagagctcatccccgtggtctcctatcaccgtcttgggtttcatgtctgatgagaagcttggacggtactgaaactcatacatgtaggtgggtgctccagcatctctgtggttccgggccacaatcacagatgggacaccaaacatcacatctgctatcaagtccaggaacaggtctttctttttgacagtgtcgtctgttcctcctaagtatttctcagtggcttctggaatcagttccttagcaatgcaaacaaggggataggacttccacaggagtgacatggctgtcttctggtccagttgcccttcggagagtggatagctcatcaactgcattggaatcaaccagccaaactcctgcttgttaattccgaccatgtaggggacagtgtggaaattcctttcagcttgaagctcttcaggtgtttt

SEQ ID NO: 8397 - DNA, 606 bp, Homo sapiens
  unsure (519): n=A,T,C or G
  unsure (535): n=A,T,C or G
  unsure (566): n=A,T,C or G
  unsure (568): n=A,T,C or G
  unsure (598): n=A,T,C or G
ctgtcagttctctaaacatttgcagcatcctactcagatctggagcatggaatacagtcttcagtttcttggaaaccatttttggctttttcagcctccagatctcactccatttcatgattccactcatgtcctgcagcagctccattgttgaccactgactccgacactccacatctgagatgagctctctcaccaactgcttctgctgaactagctcatcctcagcctctgcaaacttatccagcgtcttcttttcttcttcttccaatctttgcagctctctctgctcctcattatttaggatgcttctaagctgatcaaattctgtttgtatcctttgtctctcagtttgtacctgatacttccaggaagttttctcttctctgatgtcagcttccagcttctcagcttcctcctcttccttcttcagcctcttgaggactgcctggagtttctcctgacattccttgaatacttcctccgtgaggactgtgtggtgaccacggtgctcctganaccgctcacaaagccngcaaatgactttcctatcctccttacagaanantaggagtttctctccatgatgatcacaganatctctct

SEQ ID NO: 8398 - DNA, 372 bp, Homo sapiens
  unsure (104): n=A,T,C or G
  unsure (367): n=A,T,C or G
gtctgaatgtggtgctttgcttctgtcctggttgaccctctgctgctgggccatcaaagtttggtgcatcttctgccaatcgcagacatagctgagcatacagngagctatactttggctcttctagggctttgtccacaatcagcagtatgacccctttaaggatgagtttagactctacacccacattgaggagctcaaggcatagcttgtcaaacttttcaggagtaagcttatttagtatgcctcttactttcctgaagattgcatcatgtcgttctttttcgtttgcggagttgtttgctgcggagttgtcatctcgtctagtgcttcgtgcaggaatccatttctgagcgttttgccctgnggttt

SEQ ID NO: 8399 - DNA, 570 bp, Homo sapiens
  unsure (427): n=A,T,C or G
  unsure (480): n=A,T,C or G
  unsure (527): n=A,T,C or G
cctccccttccccagcagttcgaggctcttcactcttccagatcccagagcttctgctctgttttactcctggtcaaaaatcccagcatccttctgtacctctcaaaagccctgtttttcgggaagctgcctccggactacttttgtttcccaggattttgaagcctgaataccagggcttacttgggagaatctgttctttggcttgaagaagcggaatcgagtgaaggagacagaaaaatagagtaacaatagagtgataagtgcttataccagtgacatacagggcctgtgggaacataaagctaaccaagcagagtgggtcgggggcctgctgaggccatttctctttttttttcttaattgacacagaattgtacatatttatggggtatatagtgatgttccgataaatgtaatgtattgngatcagatcaaggtagttagcatattcacctcaaacgtgtatcatttctttgngttgggagcatttaatatcctagctatttgaaactatatattattgncagctatagtcatcctacagtgctatagaacactagaacttat

SEQ ID NO: 8400 - DNA, 542 bp, Homo sapiens
  unsure (118): n=A,T,C or G
  unsure (454): n=A,T,C or G
ctaaaataaaatttttttaatttttaaaaattacatttttatattatcttattagtatatgctcactgaggaagaaaacatttcaagcaatacagaaatgaatataaataaaatgttnaggttcttctcacctccctgttactcatagttgctagaggtgatcatttgaaaacgtggtaggctgggtgtggtggctcacacctgtaatccgagtactttgggaggccaaaaaaaaggaaggaggcttacttgaagccaggggttcaagaccaacctggcaacatagtgagaccccatctctgcaaaaaaaaattttttttaagtaactgccttttaatagcaaaataataccatcctaatctaaccacagagttaaaaaagaaagaaagtgtggtgtatatgattcagaccatttgttatctttatacaaaagtgactatgtgaaattctttgnttgtatttaagctaacgtgggattatattttacaaagtttttgtgaacttgcattttgtatttaccttgtctatagagcacagataca

SEQ ID NO: 8401 - DNA, 503 bp, Homo sapiens
gtttcattagagtggtgatgtatgaagggaagaaaatcatggctgactcaggacccatctatgataaaacctatgctggtggtagactagggttgtttgtcttctctcaagaaatggtgttcttctctgacctgaaatacgaatgtagagatccctaatcatcaaattgttgattgaaagactgatcataaaccaatgctggtattgcaccttctggaactatgggcttgagaaaacccccaggatcacttctccttggcttccttcttttctgtgcttgcatcagtgtggactcctagaacgtgcgacctgcctcaagaaaatgcagttttcaaaaacagactcagcattcagcctccaatgaataagacatcttccaagcatataaacaattgctttggtttccttttgaaaaagcatctacttgcttcagttgggaaggtgcccattccactctgcctttgtcacagagcagggtgctattgtgaggccatctctgagca

SEQ ID NO: 8402 - DNA, 358 bp, Homo sapiens
cctgtggggacgcagcagcatctctggagcggaggaagagagaggctgacacaaggctctccccctggggcggaagagctgccccagaagctgagaaacctccacaaaacaaaaacagtttgattccatccagcaactggtgacttattagctgcattgttttcaacatcacccctggcctgagctcaaatgtggctttattttgcaagcggctttgtgtgtggagacacatccggggttgataatgttgcagactgggatattttggttctttattgaaagggaagatcttactgccaccgggccccgcctcaccctccagattggaaactatgtgacccttacgatggggtcccag

SEQ ID NO: 8403 - DNA, 265 bp, Homo sapiens
  unsure (21): n=A,T,C or G
cttcactcagcaccttggcangatctgtgacggactcaggaagctgctagacgaagggaagctctgagagccctgagcctagcacattccaccttgacaaaatggttgactgagaaaacacagataatgggcttcctaaccctgctcacctggcactaacacttttcaatcttcaggcttcattccttcccaagagtgcttttgactctgagaccagcccacccccaaacagctagtggagaaggagcaatgctgaggggtgagg

SEQ ID NO: 8404 - DNA, 205 bp, Homo sapiens
  unsure (11): n=A,T,C or G
  unsure (27): n=A,T,C or G
  unsure (29): n=A,T,C or G
  unsure (50): n=A,T,C or G
  unsure (53): n=A,T,C or G
  unsure (66): n=A,T,C or G
  unsure (183): n=A,T,C or G
caaatcatttnacactgtttgtatcangngcttggcacaggaagatgccncanggtcaataaaatncagacaatattattacttaaatcctataaaacttttctgaggctggatgtggtggctcatgcctgtaatcccaacactttgggaggccaaggcaggaggaatgcttgagcccagganttcaagattagcctgggcaaaa

SEQ ID NO: 8405 - DNA, 358 bp, Homo sapiens
  unsure (259): n=A,T,C or G
  unsure (273): n=A,T,C or G
  unsure (278): n=A,T,C or G
  unsure (306): n=A,T,C or G
ttcagccacctctctttttcagttggctgacttccacacctagcatctcatgagtgccaagcaaaaggagagaagagagaaatagcctgcgctgttttttagtttgggggttttgctgtttccttttatgagacccattcctatttcttatagtcaatgtttcttttatcacgatattattagtaagaaaacatcactgaaatgctagctgcaagtgacatctctttgatgtcatatggaagagttaaaacaggtgganaaattccttgattnacaangaaatgctctcctttcccctgcccccanaccttttatccacttacctagattctacatattctttaaatttcatctcagg

SEQ ID NO: 8406 - DNA, 391 bp, Homo sapiens
  unsure (282): n=A,T,C or G
ctgaggaacaaagtatcagaggagcatgatgttctcaggaagaaagagatggagtcagggcccaaagcatcccatggctatggaggtcggtttggagtagaaagagaccgaatggacaagagtgcagtgggccatgagtatgttgccgaggtggagaagcactcttctcagacggatgctgccaaaggctttgggggcaagtacggagttgagagggacagggcagacaagtcagcagtcggctttgattataaaggagaagtggagaagcatacatctcanaaagattactctcgtggctttggtggccggtacggggtggagaaggataaatgggacaaagcagctctgggatatgactacaagggagagacggagaaacacgagtccc

SEQ ID NO: 8407 - DNA, 383 bp, Homo sapiens
  unsure (18): n=A,T,C or G
  unsure (328): n=A,T,C or G
  unsure (346): n=A,T,C or G
tgcctgttggtcctgcangcggaaaccaaatgttggagcagtatgacaagctacaagatggcagcatcaaaatgaagcctctgatgggggtgatatacgtgcctttaacagataaagaaaagcagtggtccagggatgaattgtaaaagcaacatcagcttgaccagtataaaattacagtggattgctcatctcagtcctcaaagctttttgaaaaccaacaccatcacagcttgttttggactttgttacactgttattttcagcatgaaaatgtgtgtttttttagggtttctgattcttcaaagaggcacagagccaaattggnagaggaaggatgcaaagnataaatttgtgtaatattactttaacatgcccatatt

SEQ ID NO: 8408 - DNA, 497 bp, Homo sapiens
  unsure (301): n=A,T,C or G
  unsure (349): n=A,T,C or G
  unsure (394): n=A,T,C or G
  unsure (464): n=A,T,C or G
aaggctaacagaaaagtgtttggacagtgggtgtcgagcagtactctaaacatgagtgaagccataaaagggttcctggtcaagtgctgtgcatacaattcccttggcacatcttgtgagacgatccttttaaactctccaggccccttccctttcatccaagacaacatctcattctatgcaacaattggtgtttgtctcctcttcattgtcgttttaaccctgctaatttgtcacaagtacaaaaagcaatttaggtatgaaagccagctacagatggtacaggtgaccggctcctcanataatgagtacttctacgttgatttcagagaatatgaatatgatctcnaatgggagtttccaagagaaaatttagagtttgggaaggtactangatcaggtgcttttggaaaagtgatgaacgcaacagcttatggaattagcaaaacaggagtctcaatccncgttgccgtcaaaatgctgaaagaaaaagcaga

SEQ ID NO: 8409 - DNA, 541 bp, Homo sapiens
  unsure (15): n=A,T,C or G
  unsure (20): n=A,T,C or G
  unsure (23): n=A,T,C or G
  unsure (57): n=A,T,C or G
  unsure (169): n=A,T,C or G
  unsure (221): n=A,T,C or G
  unsure (396): n=A,T,C or G
  unsure (513): n=A,T,C or G
  unsure (518): n=A,T,C or G
ccccatcaccactgncccgnggntgcctgtgtacctcttgccttttctgggcttgcntttctctcctctagtgggtggggatgactttcaatgactttcaatacttcccctgaaggaagaatgataaggagaaatgtctgttttgaggaaagggctttgaattccccanatactgaacaatttgtgtttgtgactgatggagaatttcaggaatgaatganaaagcctttgtgaaactatgcaacagtttacatcagtcatgtgaagtatttgtctaaaacagagcaaactgaagaccaaattattctcctgttgaggtccgtggatggcagatttaaagggaagaaccacaaaggcttgcaaagataggagaggctccatctctaatgcatgtanaagctccttacgggtgcccatcaagagcatagcttggaagccaccatgctgtgcggaactgcgtcagggcaaatgtcacagcaggatttccccaacccagctccatcatcacaaacncaganagctgcaggggaggacctcggcc

SEQ ID NO: 8410 - DNA, 433 bp, Homo sapiens; identical to SEQ ID NO: 8312

SEQ ID NO: 8411 - DNA, 379 bp, Homo sapiens
gagaaagccatgttcagttcgagcgccaagatcgtgaagcccaatggcgagaagccggacgagttcgagtccggcatctcccaggctcttctggagctggagatgaactcggacctcaaggctcagctcagggagctgaatattacggcagctaaggaaattgaagttggtggtggtcggaaagctatcataatctttgttcccgttcctcaactgaaatctttccagaaaatccaagtccggctagtacgcgaattggagaaaaagttcagtgggaagcatgtcgtctttatcgctcagaggagaattctgcctaagccaactcgaaaaagccgtacaaaaaataagcaaaagcgtcccaggagccgtactctgacag

SEQ ID NO: 8412 - DNA, 353 bp, Homo sapiens
ccagtggggcagcccttccccattggggtttccattgcgagcaaagttggcccagaatttcatcaccatcttgctaagtctgatctcctcttctgaggcaccctcttttaaaaatggggccccaaagacggagaagagctcatccccgtggtctcctatcaccgtcttgggtttcatgtctgatgagaagcttggacggtactgaaactcatacatgtaggtgggtgctccagcatctctgtggttccgggccacaatcacagatgggacaccaaacatcacatctgctatcaagtccaggaacaggtctttctttttgacagtgtcgtctgttcctcctaagtatttctcag

SEQ ID NO: 8413 - DNA, 505 bp, Homo sapiens
ccagtggaaatcatgccatatatggactccaaagttgacaatctgcctctgagttctggctctgcccatgggagaattcaattgaatatttttagtccttcatctccttatttgtaaatgggaagtaaaaatttatgccgtgcctatgtttcaggctggtaaaggatcaaataacatgatgccaacataagtgctttataaaatcttactatacttgaaaggtattcaatttttattcatcatttttacctacactgatttccagaaagaattttagttcagttacaacagaagatacataggcaataggaccgactattaaaacaaagataaaagaacaagaattatataataaaatagcagataattgtcccagaaaacctaagttaagcatagttgtaagagttgaacactaaatttagctttgaacttcctggcagctaagacagaacacaaaatacaattagacacaaaggtctccataatttacaaactgaagcatgct

SEQ ID NO: 8414 - DNA, 210 bp, Homo sapiens
ctgatccacgaggaccttcttgaggacatttgggaagcctcggaggccagacgcagggaataggcggtccagcgacaagtaccagtagtgcaggaagggacccatgctgcagcccaccgcaaacatgctcgctataagagtgtaagtcagggggctgggtcgggccggcaagttcctcagtccattccctctctccctccctggctaagg

SEQ ID NO: 8415 - DNA, 504 bp, Homo sapiens
  unsure (99): n=A,T,C or G
  unsure (167): n=A,T,C or G
  unsure (178): n=A,T,C or G
  unsure (186): n=A,T,C or G
  unsure (215): n=A,T,C or G
  unsure (231): n=A,T,C or G
  unsure (319): n=A,T,C or G
  unsure (412): n=A,T,C or G
  unsure (429): n=A,T,C or G
  unsure (430): n=A,T,C or G
  unsure (432): n=A,T,C or G
  unsure (469): n=A,T,C or G
  unsure (476): n=A,T,C or G
ctggggcttgtttagcttccagcacactctcagtcatagcatgtgtagctaaaggaagtaatgggaaggggttcatgttctctttataatgcagtggcnaaaggttctgaaagccttttaaactcgaaccagtgggggaaagatggatcttgaagctaatcctgcanagagttttatngaggccanggattgccttctaaattatgataaaacanaagtgaagagtttcanagcatcagattgagtgaaaagttgtcagattctgtattttttaacaatcttcaataatgtaaagattacttttaaaatatttaagttnaaactacttgaatagtattttgctgaagagcaagatatgcattaatcaccggttttatactgtccaaaatgaagcatccccgtgacaaaccanagtgggcagaagcatcnnanagcgtgacaggaaatcccaagactgcttccgcctcanaggcgtnccggctgcgattcgctgccctgttgtca

SEQ ID NO: 8416 - DNA, 399 bp, Homo sapiens
  unsure (9): n=A,T,C or G
  unsure (12): n=A,T,C or G
  unsure (19): n=A,T,C or G
  unsure (24): n=A,T,C or G
  unsure (31): n=A,T,C or G
  unsure (82): n=A,T,C or G
  unsure (87): n=A,T,C or G
  unsure (99): n=A,T,C or G
  unsure (165): n=A,T,C or G
  unsure (179): n=A,T,C or G
  unsure (193): n=A,T,C or G
  unsure (239): n=A,T,C or G
  unsure (258): n=A,T,C or G
  unsure (261): n=A,T,C or G
  unsure (272): n=A,T,C or G
  unsure (284): n=A,T,C or G
  unsure (308): n=A,T,C or G
  unsure (312): n=A,T,C or G
  unsure (319): n=A,T,C or G
  unsure (320): n=A,T,C or G
  unsure (327): n=A,T,C or G
  unsure (340): n=A,T,C or G
  unsure (343): n=A,T,C or G
  unsure (345): n=A,T,C or G
tgattgtanctntgttggngtatntcgtgtncaagatggaaaagtgcttttgttgttctacctgatccagttgggggagcangaatngggggtgcctgnctaacggcctctagcccatgtgcttatactgggatctgtcccgagggatctgcacctggttggcantcattttgtggtgngacgtggtaaatcncgagtgttaccatgatgacgaggcccaagatgagccccaaaatcangggcaaggtttcttccagntgntcccgctcatncactgggcattnatgctcttcactgaagacaaaatntganataatgnnaaaaggntggatgtggaccncananaggatcatggggaccgtcttctgcggatcactacaggccaatgaaatggtttgt

SEQ ID NO: 8417 - DNA, 473 bp, Homo sapiens
  unsure (15): n=A,T,C or G
  unsure (20): n=A,T,C or G
  unsure (133): n=A,T,C or G
  unsure (139): n=A,T,C or G
  unsure (150): n=A,T,C or G
  unsure (165): n=A,T,C or G
  unsure (183): n=A,T,C or G
  unsure (231): n=A,T,C or G
  unsure (306): n=A,T,C or G
  unsure (332): n=A,T,C or G
  unsure (350): n=A,T,C or G
  unsure (376): n=A,T,C or G
  unsure (440): n=A,T,C or G
  unsure (455): n=A,T,C or G
ctggcattggtctanagctntataaggccattcagcgagggaccatcaagtgcaactttgcgggggttgccttgggtgattcctggatctcccctgttgattcggtgctctcctggggaccttacctgtacancatgtntcttctcgaanacaaaggtctggcanaggtgtctaaggttgcanagcaagtactgaatgccgtaaataaggggctctacagagaggccacanagctgtgggggaaagcagaaatgatcattgaacagaacacagatggggtgaacttctataacatcttaactaaangcactcccacgtctacaatggagtcnagtctagaattcacacanagccacctaggccaggctaccaacgnctttgtgaacatggaggaggacttcatgaagccagtcattagcattgtggacgagttgctggangcagggatcaacgtnacggtgtataatggacag

SEQ ID NO: 8418 - DNA, 353 bp, Homo sapiens
  unsure (18): n=A,T,C or G
  unsure (28): n=A,T,C or G
  unsure (43): n=A,T,C or G
  unsure (44): n=A,T,C or G
  unsure (85): n=A,T,C or G
  unsure (119): n=A,T,C or G
  unsure (152): n=A,T,C or G
  unsure (178): n=A,T,C or G
  unsure (201): n=A,T,C or G
  unsure (211): n=A,T,C or G
  unsure (215): n=A,T,C or G
  unsure (263): n=A,T,C or G
  unsure (327): n=A,T,C or G
ccttctctgcttcagtcntgttcttcangatagtgtacatgcnnccaatgttgaagcaaatccgggagtgggggtcctggacggnactgaaggcatccagggctcccttccagtccttnttgtccgctgccagcaccccttcattccagagnctgatggcctccaccagggacatgantaggtagaaactaggaggccaanagagctgccngganacagagagaagacaggttggagcgtctcccctagcagggctgccttantggcccccaaggtgttcactttctgggccagatgagtagaatggggcccagcctcccttaaganaacttctcagtgttgcaaatgcatca

SEQ ID NO: 8419 - DNA, 496 bp, Homo sapiens
  unsure (363): n=A,T,C or G
tcgacgccaggagaaaggggggaggagaagccgttggatggacaggaacacagggagaggccggagggggaaacaggggatttgggcaagagagcagaagatgtaaaaggtgaccgggagcttcgaccagggcctcgagatgagccacggtccaatgggcgacgagaggaaaagacagagaagccccggttcatgttcaatatcgccgatggtggcttcacagagcttcacacactgtggcagaatgaggaacgggcagctatttcctcggggaaactcaatgagatctggcacagaagacatgactattggcttctggctgggattgtcctccatggctatgcacggtggcaggacatccanaatgatgctcaatttgccattatcaacgagccatttaaaactgaagccaataaggggaactttctggagatgaaaaataagttcctggcccggaggttcaagctcctggagcaggcgctggtgattgaggagc

SEQ ID NO: 8420 - DNA, 208 bp, Homo sapiens
  unsure (5): n=A,T,C or G
  unsure (28): n=A,T,C or G
  unsure (42): n=A,T,C or G
  unsure (51): n=A,T,C or G
  unsure (63): n=A,T,C or G
  unsure (118): n=A,T,C or G
  unsure (120): n=A,T,C or G
  unsure (135): n=A,T,C or G
  unsure (138): n=A,T,C or G
  unsure (159): n=A,T,C or G
gaatnaagcactttgtctgatggtcaanctattgcagaccanagtgaaatnataccaacattnggccaatttgaaaggactcaggaggagtatgaatacaaaaaacatgctggtcctncntttcaaccagaattntcntcaggagctgaggaggcattnatagaccatactccctatctaagtattgctactacccaccttatggatc

SEQ ID NO: 8421 - DNA, 313 bp, Homo sapiens
ccggacccggagccgccatgcccaagtgtcccaagtgcaacaaggaggtgtacttcgccgagagggtgacctctctgggcaaggactggcatcggccctgcctgaagtgcgagaaatgtgggaagacgctgacctctgggggccacgctgagcacgaaggcaaaccctactgcaaccacccctgctacgcagccatgtttgggcctaaaggctttgggcggggcggagccgagagccacactttcaagtaaaccaggtggtggagaccccatccttggctgcttgcagggccactgtccaggcaaatgccagg

SEQ ID NO: 8422 - DNA, 471 bp, Homo sapiens
  unsure (56): n=A,T,C or G
  unsure (90): n=A,T,C or G
  unsure (119): n=A,T,C or G
  unsure (198): n=A,T,C or G
  unsure (238): n=A,T,C or G
  unsure (328): n=A,T,C or G
  unsure (359): n=A,T,C or G
cctttctctatatcacctttctggaaatcctgccccaggagctggccagttctgancaaaggatcctcaaggtcattctgctcctagcangctttgccctgctcactggcctgctcttnatccaaatctagggggcttcaagagaggggcaggggagattgatgatcaggtgcccctgttctcccttccctcccccanttgtggggaataggaaggaaaggggaagggaaatactgangaccaaaaagttctctgggagctaaagatagagcctttggggctatctgactaatgagagggaagtgggcagacaagaggctggccccantcccaaggaacaagagatggtcaagtcgctngagacatatcaggggacattaggattggggaagacacttgactgctagaatcagaggttggacactatacataaggacaggctcacatgggaggctggaggtgggtacccag

SEQ ID NO: 8423 - DNA, 332 bp, Homo sapiens
  unsure (130): n=A,T,C or G
  unsure (142): n=A,T,C or G
  unsure (167): n=A,T,C or G
  unsure (168): n=A,T,C or G
  unsure (183): n=A,T,C or G
  unsure (228): n=A,T,C or G
  unsure (243): n=A,T,C or G
  unsure (262): n=A,T,C or G
  unsure (297): n=A,T,C or G
  unsure (310): n=A,T,C or G
  unsure (323): n=A,T,C or G
  unsure (325): n=A,T,C or G
aggccacctggattgcgcctaatgtgtttgagcatcacttaggagaagtcttctatttatttatttatttatttatttatttgtttgttttagaagattctatgttaatattttatgtgtaaaataaggntatgattgaatntacttgcacactctcccattatatnntattgtttattttangtcaaacccaagttagttcaatcctgattcatatttaatttgaanatagaaggtttgcanatattctctagtcatttgntaatatttcttcgtgatgacatatcacatgtcagncactgtgatagangctgaggaatccnanaaaatgg

SEQ ID NO: 8424 - DNA, 379 bp, Homo sapiens
  unsure (16): n=A,T,C or G
  unsure (39): n=A,T,C or G
  unsure (42): n=A,T,C or G
  unsure (67): n=A,T,C or G
  unsure (120): n=A,T,C or G
  unsure (177): n=A,T,C or G
  unsure (198): n=A,T,C or G
  unsure (214): n=A,T,C or G
  unsure (259): n=A,T,C or G
  unsure (284): n=A,T,C or G
  unsure (289): n=A,T,C or G
  unsure (297): n=A,T,C or G
  unsure (316): n=A,T,C or G
  unsure (320): n=A,T,C or G
aggagtaccataattntggtagctaaatatatattttanatngatgaagaagctagaaaacaggcanattcctgactgctagtttatatagaaatgtattcttttagtttttaaagtaanggcaaacttaacaatgacttgtactctgaaagttttggaaacgtattcaaacaattngaatataaatttatcatttanttataaaaatatatancgacatcctcgaggccctagcatttctccttggataggggaccanagagagcttggaatgttaaaaacanaacanaacaaaanaaaacaaggagaagttgtncaanggatgtcaattttttatccctctgtatgggttagattttccaaaatcataatttgaaga

SEQ ID NO: 8425 - DNA, 282 bp, Homo sapiens
gaggcacaaggcacaacaggctgctctgggattctcttcagccaatcttcattgctcaagtgtctgaagcagccatggcagaagtacctgagctcgccagtgaaatgatggcttattacagtggcaatgaggatgacttgttctttgaagctgatggccctaaacagatgaagtgctccttccaggacctggacctctgccctctggatggcggcatccagctacgaatctccgaccaccactacagcaagggcttcaggcaggccgcgtcagttgttgtgg

SEQ ID NO: 8426 - DNA, 389 bp, Homo sapiens
  unsure (121): n=A,T,C or G
  unsure (128): n=A,T,C or G
  unsure (148): n=A,T,C or G
  unsure (149): n=A,T,C or G
  unsure (169): n=A,T,C or G
  unsure (171): n=A,T,C or G
  unsure (241): n=A,T,C or G
  unsure (245): n=A,T,C or G
  unsure (249): n=A,T,C or G
  unsure (271): n=A,T,C or G
  unsure (294): n=A,T,C or G
  unsure (308): n=A,T,C or G
  unsure (312): n=A,T,C or G
  unsure (340): n=A,T,C or G
  unsure (371): n=A,T,C or G
  unsure (372): n=A,T,C or G
ctggtgtcaagacctgggttagaggtttgtcaaacagaggcagggcccagtcacctctttggaggggagtgatgagaaggggattttggtcacctgagagggttgagtaaacttggatcanggcacangcttctctcaccatactcanntttttgcactcactccctantngagcctactggcatcaagctctagatgccaaggctgggatggctgtggagcaggagctatggcccaagtngctntganaggggaagagacctaaaacccntagcagggaaaatactgacgctnggtgtgaacatatnactntcttttcacaagagtcctgatggggctnggctgagcttttgggtactcatccctactgnntatagctggagaggatt

SEQ ID NO: 8427 - DNA, 392 bp, Homo sapiens
  unsure (8): n=A,T,C or G
  unsure (9): n=A,T,C or G
  unsure (30): n=A,T,C or G
  unsure (41): n=A,T,C or G
  unsure (42): n=A,T,C or G
  unsure (43): n=A,T,C or G
  unsure (57): n=A,T,C or G
  unsure (59): n=A,T,C or G
  unsure (73): n=A,T,C or G
  unsure (74): n=A,T,C or G
  unsure (91): n=A,T,C or G
  unsure (100): n=A,T,C or G
  unsure (132): n=A,T,C or G
  unsure (142): n=A,T,C or G
  unsure (155): n=A,T,C or G
  unsure (163): n=A,T,C or G
  unsure (174): n=A,T,C or G
  unsure (184): n=A,T,C or G
  unsure (194): n=A,T,C or G
  unsure (305): n=A,T,C or G
  unsure (315): n=A,T,C or G
  unsure (317): n=A,T,C or G
  unsure (325): n=A,T,C or G
  unsure (327): n=A,T,C or G
  unsure (332): n=A,T,C or G
  unsure (348): n=A,T,C or G
  unsure (360): n=A,T,C or G
  unsure (365): n=A,T,C or G
  unsure (373): n=A,T,C or G
catgctgnncctgtcctggcctcaagtganccacccacctnnncctctcagtgttgngnttataggcaaccgnncccggccaaatccattntcatcactnaatgtttaaaggctacgttcagtttcctatangtgatattgntaggatctactancaaatganttggtaacctnacatctttgnattcatgtcnaaaaaaattcttttataagaacaaaaatggtactcttagcctcattcactggagtattactgaaaagcatgatattcttactctattttgggtacattatgacagagaggntattattacnanctgtcagnanaactnaggcttcttgagtaanggggattgaggnaaacntttggaanctggtgaatacatttcaag

SEQ ID NO: 8428 - DNA, 321 bp, Homo sapiens
  unsure (10): n=A,T,C or G
ctggcttccnagaggcaattctgtccttggaagccaggtttgaccatctgtaatcagccttgtgagaagtctcgtttgagggggccagggatggaacgggagggcgcatatcgtatgaggtatgggcattgtgttaagctgggggaagttgcagcttgtcctgaattacatggagaggaataaagtgggtgagtaggaggagccatttcatctgaaagcctgaggcccctctggtcccctcgataaaccccactggtgtcccaggccacaggtaacaggagaatagacatttaatgtcacagaatgtcagagcaggcaagg

SEQ ID NO: 8429 - DNA, 383 bp, Homo sapiens
  unsure (80): n=A,T,C or G
  unsure (83): n=A,T,C or G
  unsure (275): n=A,T,C or G
ccatggacaagctgaggaagatgctggttccctgcccacagaccttccaggagaatgacctgagcaccttctttcccttnatntttgaagaagaacctatcttcttcgacacatgggataacgaggcttatgtgcacgatgcacctgtacgatcactgaactgcacgctccgggactcacagcaaaaaagcttggtgatgtctggtccatatgaactgaaagctctccacctccagggacaggatatggagcaacaagtggtgttctccatgtcntttgtacaaggagaagaaagtaatgacaaaatacctgtggccttgggcctcaaggaaaagaatctgtacctgtcctgcgtgttgaaagatgataagcccactctacag

SEQ ID NO: 8430 - DNA, 476 bp, Homo sapiens
ctggcattgtggcagtgctaaagcagcgccccagattggtggctgcagcagtccaggcattttacctacgagaccctattgacctgcgagcttgtcgtgttttcaagacattcttgcctgaaacacgaataatgacatcggtcacattcactaaatgtctatatgcacaattggtgcaacaaaggtttgtgccagaccggcggagtggatacaggctgcctcctccatctgatccccagtaccgagcccatgaattgggcatgaaattggctcatggatttgagatcttatgctccaaatgtagcccacatttttctgactgcaagaaatcccttgtgactgcctcaccactctgggccagtttccttgaaagtctgaaaaagaatgattactttaagggactgatagaaggttctgctcagtaccgggaaaggctagaaatggcagagaattacttccagctctcagtagactgg

SEQ ID NO: 8431 - DNA, 495 bp, Homo sapiens
ctgttagggctgaatcttctggagaaaaaggtgccatctcaggagaatagcttttactctggtaggaatgcttccgagacaccacaaggcagcctgaacactcagttgcagggtcgggcttgcggtgggtgacccagagccaccaaagtcacatccacaactaatgagggaaatctgtaaagccagttagatagaagaattttatttttctgtgggttttgtgttgtcttttttatgttaaaaagaaatccagtttgtgtttttctatagaaaaagtaaaagatcaggttatactttaggttaggggttctatttattcctgttagtaaataaaattaacaaatttctttgtttaacaaaagattaatctttaaaccactaaaatacatagactgattgattattcaacacattggaattgatgtcggtcatagtttcctgaagcatttagttacaacctgaaggaataaaatgatttgtggaaatgcttaaaat

SEQ ID NO: 8432 - DNA, 383 bp, Homo sapiens
ccatggacaagctgaggaagatgctggttccctgcccacagaccttccaggagagtgacctgagcaccttctttcccttcatctttgaagaagaacctatcttctttgacacatgggataacgaggcttatgtgcacgatgcacctgtacgatcactgaactgcacgctccgggactcacagcaaaaaagcttggtgatgtctggtccatatgaactgaaagctctccacctccagggacaggatatggagcaacaagtggtgttctccatgtcctttgtacaaggagaagaaagtaatgacaaaatacctgtggccttgggcctcaaggaaaagaatctgtacctgtcctgcgtgttgaaagatgataagcccactctacag

SEQ ID NO: 8433 - DNA, 460 bp, Homo sapiens
  unsure (441): n=A,T,C or G
  unsure (443): n=A,T,C or G
  unsure (453): n=A,T,C or G
ccagatttctgaagaaacatggaattttctgcagtttatttatggtggagggcctgaagttatcctgcgacctccggttgttcatgttgatccagatatacttcaagcagaagaaaaaattgaagtagaaactcggtctttgtaatttttaggatgtagagagttctaatgaggaatcattttcatgtgccctgacatgtacacatgcgaaaacattcctaaaagcgtgtttatttgctttattttttttcatcatttatcccatttatttcttcttagtgggcattatggaagaatatattaaaatgtgtaatataccacaggttggtatatttagttttaaatacttaccataaagtctttcagtgtaatttttttttgagacagagtcttgctttgtcacccaggctggagtgctgtggtgttacctcagctcactgnancctccacctnctgggtt

SEQ ID NO: 8434 - DNA, 482 bp, Homo sapiens
  unsure (188): n=A,T,C or G
  unsure (204): n=A,T,C or G
  unsure (253): n=A,T,C or G
  unsure (326): n=A,T,C or G
  unsure (425): n=A,T,C or G
  unsure (440): n=A,T,C or G
  unsure (470): n=A,T,C or G
ccaatatgcctttggagcacagcctatggtttatgtttcttttatgaccacctttaatatctgtcaaacgactagacatgctatagctttacccgaaggtaatttgattgactgtgctctgctagaagatggtgtatgggtccctctcgaggtaactgccaataaatgataagtggtatttgttttanataatgcctctacctnagtggtagctttgataatggcaaattgtaattgcaagtgccattttcanaataggcattggtttattttaggaagaggataataaagttccttttagttatcaaagtaacaccttttattgntaaatctcaacttttgaagaaaacactttcaatttcttaactttttcctcagggttagtgagttagtacaactacccaaagaagtgttaaaatattganattctatatgtgtgngtttatatgtgcatctatgtattacgtatncaaaatatttca

SEQ ID NO: 8435 - DNA, 411 bp, Homo sapiens
ccttattattattattattttttttttgctgacaagtccaagatggcagtcggaactctgacccataaaaccagaaggcttagatgaagaacaaaaagaagggaaaccaaccctgcttccttttgcctgttattaatcgctgcaataaagccattagaatctaccaacatatcacccaacttgaaaagaagagagattctgaaaaatagtcagaaaagaagggtaaatggaaatgatgagtccctcccctttatggctattttaagaagcacaccatgttattcatatggcccgtgcttagcccactccctgaattgtttgattttagtggatataaaaattcttcctaagggctttcttagttccactgccagcagtagttccccatttctatttctcgttaggtctcaa

SEQ ID NO: 8436 - DNA, 430 bp, Homo sapiens
  unsure (10): n=A,T,C or G
  unsure (327): n=A,T,C or G
  unsure (333): n=A,T,C or G
  unsure (393): n=A,T,C or G
  unsure (394): n=A,T,C or G
  unsure (402): n=A,T,C or G
  unsure (405): n=A,T,C or G
aaataggaantattttaatgtttcttggggaatatgttagagaatttccttactcttgattgtgggatactatttaattatttcactttagaaagctgagtgtttcacaccttatctatgtagaatatatttccttattcagaatttctaaaagtttaagttctatgagggctaatatcttatcttcctataattttagacattctttatctttttagtatggcaaactgccatcatttacttttaaactttgattttatatgctatttattaagtattttattaggagtaccataattctggtagctaaatatatattttagatanatgaanaagctagaaaacaggcaaattcctgactgctagtttatatagaaatgtattcttttagtnnttaaagtnaangcaaacttaacaatgacttgtactc

SEQ ID NO: 8437 - DNA, 390 bp, Homo sapiens
  unsure (51): n=A,T,C or G
  unsure (62): n=A,T,C or G
  unsure (63): n=A,T,C or G
  unsure (82): n=A,T,C or G
  unsure (83): n=A,T,C or G
  unsure (147): n=A,T,C or G
  unsure (151): n=A,T,C or G
  unsure (174): n=A,T,C or G
  unsure (185): n=A,T,C or G
  unsure (220): n=A,T,C or G
  unsure (270): n=A,T,C or G
  unsure (272): n=A,T,C or G
  unsure (287): n=A,T,C or G
  unsure (309): n=A,T,C or G
  unsure (312): n=A,T,C or G
  unsure (320): n=A,T,C or G
  unsure (328): n=A,T,C or G
  unsure (334): n=A,T,C or G
  unsure (362): n=A,T,C or G
  unsure (364): n=A,T,C or G
tgttttctaagtcctctcccctaataaaacctacccaacaatagtgctttnaaaagtggtannttatcttgaagatactctnnccaaatgcaaagataaacattctttttgtctgctttataaatatgaaatatgccagatctatantatnttaatgtgcatctactttaaatnagtcatcttgnggtttttataattcccttatgttcttgcccctctncacttgaaataacaaaatgccttaattttatggattagttctcttatagnanacaggcagctatatncagcaaaaccaataaagttatnttncaactttnatagttgnaaaatntcttataacaggaatacaaaacagctangnaaacatgccacattttattttagcat

SEQ ID NO: 8438 - DNA, 436 bp, Homo sapiens
  unsure (370): n=A,T,C or G
cctggctcaacaaaagggctggggattggccctgaaaggagagagctgactgtcctggctgatggacaggagatcctcttagcactaccctaaggcaggcagttgggcattggtgtagacaacaggaaagtccaggctatagccgtactcaaaaacctttctgttccctttctgccagccctagggattgagtccacattcagcacaggactctctgggtacagctctctttaggaagacacaaattgcatggtgaagtcagttatatcctggccgcctttggtccctcccaggaagacgggcatgttttctgcttgagaggtgctgatgtaccagttggggaactgggcagactcaaattccagcttgntattgatttctatcttgttgaagacaaatcgcttttccatcttcttctttgggtaatttttgggat

SEQ ID NO: 8439 - DNA, 310 bp, Homo sapiens
gaaaaaatatataataagtacataaaactacacaaatgtttgcatttcaggattatgaattataagtcagtttgttacttcaccatagcaagatgttgtgaatccactaaaatgttctttatggggattgtaatttaaagactgaagagcaggaacgatcactggttacaactgtatgacgtggactggacaaagactcgagattaatatccaaaaaggtttatagatgggtttgaataatagataatgggtcatttttataacattttacaataattaattttatttcatcttttaatgtggggggtgg

SEQ ID NO: 8440 - DNA, 313 bp, Homo sapiens
  unsure (102): n=A,T,C or G
  unsure (162): n=A,T,C or G
aaacaatgaggggagagaatgagggacagagagaggaggggactgaggggccaaggaggttccgatgagcaaaaatggaagagaaagaacgtcagagaggangctattgggggatgaggagagagaccagagatcaagaagcatgaaggtattgagggccanagaggggacttctagggacatggagaggctgcaggacagagaaagggctcggggaacgggacagtggttctttcatttcaatgatcaaagttcccagctttttgacaccacaggggcaccctgacaattctggcaataagaacatgaaagg

SEQ ID NO: 8441 - DNA, 481 bp, Homo sapiens
  unsure (371): n=A,T,C or G
ccttggcctggccttgactttgggaaccttggaaatctttgggccttgactttgggaatcttggctgtggctgggagaaagctgggtggtcttggaggatgagcagaggtgacaggcttgggtgggaccgtttgaacatccttcctaaccagtgccttccccggcacagactggacttcgacattgtccggcgaagcagtgggtggtgtctggcagcgacttgggagatcatttcccgatgacatcacagtgtggtgttttctcttggatgcaaaccacactcttcacttggcttcaaaacagcttaagcgagcgaacagagactaggagggaacggaaactgtccgagcaggcgggcgggggcggcttangatctgtagtcctttttgctgtagggtttattgcccaaaatactatcaatctcgtggataatggaagacgacagtttcggaaggacctgtattgccccaatgttctccat

SEQ ID NO: 8442 - DNA, 467 bp, Homo sapiens
cctggacctgtgtaaaccttcaaacactcttttttacattaggtcatgaagttaaattttttactgtttctgtgctacagactcttcaaaggaaaatagttaagtcaatttcaaagaaaatgaccagcacatttttaaaacattagaaatgatttgactttgactatctactgccaaaaaaaggttaaggaatttgtaatgagaagctaaaaactttaaggaattttaaggaactcaaaacaaaaactcattaaatgtaattaaagtgaattctacaaataaagtctcttaatacatttctataatagtcacttaagacttaaattcaaacactagcaaaccacaaaatcagactgtatgactgacatccaaaagataaatataaatcaaaatccgaccccagcattagccaaggggtaggtgttcctcttgaggaaggcaggaattcctcttctgccacctgttgg

SEQ ID NO: 8443 - DNA, 391 bp, Homo sapiens
cgagatcgtaccactgcactctcgtctgagcgatagagtgagactctgcctcaaaaacaacaataacaaaaagaaaaacctgtgaggttgtaggttctttcccctttttcctttcctttttttttccccctttttcctttttcctttcctttttctctcactctgtcacccaacctggatgggagtggagtgtagtggtgtgatcatggcccactgcagccttaacttccttggctcaagtgatcctcctgcctcagcctcctgagtagttgggacaacaggcatgcactaccatgcctggctaattttttactttttgtagagacagggttttgccatgttgcccgggctggtctcaaactcctgggctcaggagatccacccacctagg

SEQ ID NO: 8444 - DNA, 430 bp, Homo sapiens
ccattcctgaatctatatttggcaaagccattctattattaacactgtaacatactgcattcaaatctaacctttgactttctcaaacgtatccctttatctcaactttacattattctgtgaaatattagacaagtagagaaaaggaaacagacccagaagttttgattcagtgatactgacccaatacacaccgtaaagttgtacagcaaaaactataactagttaagatcactcccaattttttgctcattcgcatataatacttaatatcctaaaatattgctaaaattatttaaggtagtatttataaggctattcctataaagtgttggcattttataaaatacttcagatttgaatattcctcaatctccgtgtccatccagctcttcttactcatgttaatttctctctagactctttgcag

SEQ ID NO: 8445 - DNA, 273 bp, Homo sapiens
ttttttttttgaactaaaaaagaactttatttattgagggcaaggggatgcaaacaatacaaaaatcaaaagcttatctggtatttaacttttctttctctgcttgtcaaatgagagttagattttatttttacatttgctaagtgtcctgatctgctcatgaaatccttctatgggggaagctgtggggcagattccttaagcgaccctttgggacaactcttatcagggaggagcgaactgctcatttctgcctacttctttcccttctgc

SEQ ID NO: 8446 - DNA, 510 bp, Homo sapiens
  unsure (277): n=A,T,C or G
  unsure (284): n=A,T,C or G
  unsure (432): n=A,T,C or G
  unsure (445): n=A,T,C or G
ccttggctgcaggaacagactttttccatcggcttttccagggcccaggtgaagaggccacttcagcaacagagggtacaggagagagtttaggggctggtggagattaaagtgggataagtgtatctaaatagacttatgtacactaaaccaatgaaggagaggtttggctttaagaaataaatatgcccccaaccccagaaaccaagctgctgagtaggttccacaggcgagatacacatttaacactcaccccgggccagtacacttgactggnttaattntagtacatctgtcatcactatacactgagtagaatacagtggataagcaaaggtttctccaccatggagagagatttgtgttgccacaaactgtttctgtcacccacccgtgtggggacttctgagaaagttttcttgttccaagganccatgtgactcancgcgaggccctgcctcagcagaagctctgagccagaagccacatatattgctggagacaacatgg

SEQ ID NO: 8447 - DNA, 492 bp, Homo sapiens
  unsure (13): n=A,T,C or G
  unsure (31): n=A,T,C or G
  unsure (108): n=A,T,C or G
  unsure (430): n=A,T,C or G
  unsure (431): n=A,T,C or G
  unsure (433): n=A,T,C or G
  unsure (473): n=A,T,C or G
  unsure (476): n=A,T,C or G
ctgtctgtactanacaaggttaccaagtgcngaattggttaatactaacagagagatttgctccattctctttggaataacaggacatgctgtatagatacaggcagnaggtttgctctgtacccatgtgtacagcctacccatacagggactgggattcgaggacttccaggcgcatagggtagaaccaaatgatagggtaggagcatgtgttctttagggccttgtaaggctgtttccttttgcatctggaactgactatataattgtcttcaatgaagactaattcaattttgcatatagaggagccaaagagagatttcagctctgtatttgtggtatcagtttggaaaaaaaaatctgatactccatttgattattgtaaatatttgatcttgaatcacttgacagtgtttgtttgaattgtgtnngntttttcctttgatgggcttaaaagaaattatccaaagggnganagagcagtatgccact

SEQ ID NO: 8448 - DNA, 313 bp, Homo sapiens
ctggagactcaaactcctgtacagctaccttctgggaaatagtttttgacacctatttttcagattcttgtccggaatttctgctgctcttttcaaaaaagggcattaacaattctctggaaataaagcacctgttagcctgacatatgcaaaaagcagggcggcatcacccattacgagctcccccagccagcagtcagtattggattggccttgcctggctggtggcagtttgggagaaacagccaaagaggttagtttatttcaacaccaaattagaccatggcccatttccaacgggtctctttaaagg

SEQ ID NO: 8449 - DNA, 428 bp, Homo sapiens
  unsure (10): n=A,T,C or G
  unsure (104): n=A,T,C or G
  unsure (146): n=A,T,C or G
  unsure (165): n=A,T,C or G
  unsure (178): n=A,T,C or G
  unsure (227): n=A,T,C or G
  unsure (315): n=A,T,C or G
  unsure (318): n=A,T,C or G
  unsure (319): n=A,T,C or G
  unsure (332): n=A,T,C or G
  unsure (359): n=A,T,C or G
  unsure (379): n=A,T,C or G
  unsure (388): n=A,T,C or G
  unsure (417): n=A,T,C or G
cctggctcancaaaagggctggggattggccctgaaaggagagagctgactgtcctggctgatggacaggagatcctcttagcactaccctaaggcaggcagtngggcattggtgtagacaacaggaaagtccaggctatagccgnactcaaaaacctttctgtnccctttctgccanccctagggattgagtccacattcagcacaggactctctgggtacagctntctttaggaagacacaaattgcatggtgaagtcagttatatcctggccgcctttggtccctcccaggaagacgggcatgttttctgcntgnnaggtgctgatgtnccagttggggaactgggcagactcaanttccggcttgttattgattnctatcttgntgaagacaaatcgcttttccatcttcttnctttgggtaat

SEQ ID NO: 8450 - DNA, 383 bp, Homo sapiens; identical to SEQ ID NO: 7947

SEQ ID NO: 8451 - DNA, 68 bp, Homo sapiens
  unsure (16): n=A,T,C or G
  unsure (17): n=A,T,C or G
  unsure (40): n=A,T,C or G
  unsure (59): n=A,T,C or G
caagcttttttttttnntttttttttttttttttgctttnaatatattttattctgacnaagttacaa

SEQ ID NO: 8452 - DNA, 368 bp, Homo sapiens; identical to SEQ ID NO: 8376

SEQ ID NO: 8453 - DNA, 608 bp, Homo sapiens
  unsure (519): n=A,T,C or G
  unsure (527): n=A,T,C or G
ccacactctacttctgcttctgccacctatggggtcgaggcaggtgtggtgccttggctaagtccacagacttctgagaggcccacgctttcttcttctccagaaataaaccctgaaactcaagcagctttaatcagagggcaggattccacgatagcagcatcagaacagcaagtggcagcgagaattcttgattccaatgatcaggcaacagtaaaccctgtggaatttaatactgaggttgcaacaccaccattttcccttctggagacttctaatgaaacagatttcctgattggcattaatgaagagtcagtggaaggcacggcaatctatttaccaggacctgatcgctgcaaaatgaacccgtgccttaacggaggcacctgttatcctactgaaacttcctacgtatgcacctgtgtgccaggatacagcggagaccagtgtgaacttggtaagatggtacttggctgaaaaggtgcagttctttcacagaagatatattgggggagaatntatgttgncgaatcaatcagagatttcaaagaaacccatatgaagattaattatatgttaaatgaagttaaaatctgagggtaattaac

SEQ ID NO: 8454 - DNA, 323 bp, Homo sapiens
  unsure (8): n=A,T,C or G
  unsure (24): n=A,T,C or G
  unsure (81): n=A,T,C or G
  unsure (142): n=A,T,C or G
  unsure (310): n=A,T,C or G
ctgtgttnccatgggacccctctnattcattagccttgggcttacactgagttctccacatgaaactgatgacttgtccanaacaactgcccagcaaaagctaagactcattcaacttgaaggcttgaaaacccaacaagtnaaccttttctaccttctttatgctctcttgcaagtccttatataggtttatattttcctggccccataggggcagaccttatagaggcaaagacctttgaattctggggagatggtgatcaccttattaactcccttctgcatacgtggattacagaggagtaagcanaccaagagcacag

SEQ ID NO: 8455 - DNA, 264 bp, Homo sapiens
  unsure (61): n=A,T,C or G
  unsure (72): n=A,T,C or G
  unsure (202): n=A,T,C or G
ccacaacaactgacgcggcctgcctgaagcccttgctgtagtggtggtcggagattcgtanctggatgccgncatccagagggcagaggtccaggtcctggaaggagcacttcatctgtttagggccatcagcttcaaagaacaagtcatcctcattgccactgtaataagccatcatttcactggcgagctcaggtacttntaccatggctgcttcagacacttgagcaatgaagattggctgaagagaatcccagagcagcc

SEQ ID NO: 8456 - DNA, 434 bp, Homo sapiens
  unsure (54): n=A,T,C or G
  unsure (75): n=A,T,C or G
  unsure (89): n=A,T,C or G
  unsure (92): n=A,T,C or G
  unsure (105): n=A,T,C or G
  unsure (111): n=A,T,C or G
  unsure (134): n=A,T,C or G
  unsure (139): n=A,T,C or G
  unsure (154): n=A,T,C or G
  unsure (199): n=A,T,C or G
  unsure (248): n=A,T,C or G
  unsure (318): n=A,T,C or G
  unsure (323): n=A,T,C or G
  unsure (338): n=A,T,C or G
  unsure (374): n=A,T,C or G
  unsure (393): n=A,T,C or G
ctgcatccacagacttcaactacatgattacttctttgcccattcttctctttnttttctttcccgaataacctntttcagatacggtncanggtagaaattttnctcttnatatttggtccactgctctttangcaanatctgatgcttcaanattcaggtccagtgccctcttaatgcgaaacatcctgtcattatnaaggttctcaggaagtcttcttatggcttcttttacatcttcatcctcntatattgtatcatctcgcattaaccctatgatagatgacaaagttagattgcacatgcatctcaaaaatngcggnttttttaaattagtnaaatacctttatgacttataacttacaacttttggngaactatcgaattcaaatnactaggttcaatggaaattcaatgcatttcatacattatag

SEQ ID NO: 8457 - DNA, 490 bp, Homo sapiens
cctgagcagacactgctgggggagagagaaagttcacatccccccaccaagcacggtctcagattaggttattacaaagggcgagggggaggagggcatcccaggagtctaacatccaacccgacctatgtagaatgacgggtgaccacgccctgacccagccacacacttgaaccctgggacttcagtgaggtaggtggtatcagccccatttcacaggtgggcaaactgaggcagaatgaaatgcaatagctcgcttttaataacaacatacaaaagtctggagaaggccccaaagtagtcccctgttcccagagcccaaagaataaacagatgggagaacaagaccctcctcttccttttcccccacagagaagatccctaaacacatcaccggaacccctcaaatattcctgggaacttcaaacaaaaaaacatagcaacaaagagacccagcttccagtttattcccagttgggtaggggacagg

SEQ ID NO: 8458 - DNA, 338 bp, Homo sapiens
  unsure (40): n=A,T,C or G
  unsure (111): n=A,T,C or G
  unsure (149): n=A,T,C or G
  unsure (190): n=A,T,C or G
  unsure (191): n=A,T,C or G
  unsure (192): n=A,T,C or G
  unsure (200): n=A,T,C or G
  unsure (203): n=A,T,C or G
  unsure (204): n=A,T,C or G
  unsure (218): n=A,T,C or G
  unsure (221): n=A,T,C or G
  unsure (231): n=A,T,C or G
  unsure (238): n=A,T,C or G
  unsure (256): n=A,T,C or G
  unsure (258): n=A,T,C or G
  unsure (325): n=A,T,C or G
ctgcccgcaggccccaggtcttcatggagttgctccttanttctctatgaaacacctcctctgctgagaagtccccgtggtgcaggagcagtaaggtatccccagacttgntggagaatgggactagctggtcaccccgctgccgggcnatcacagtgaccacgtgagctgggcccaggtcagggtcatnnncgctcagnccnncataggaaaagganacncgcaagtctnccacctntggatacttgggattttngntgtggtagaaaaagtctccacggcgaatgatgtccacatgagggtcctccagcttggataggctcanggacttgaagttg

SEQ ID NO: 8459 - DNA, 477 bp, Homo sapiens
  unsure (210): n=A,T,C or G
  unsure (258): n=A,T,C or G
  unsure (314): n=A,T,C or G
  unsure (329): n=A,T,C or G
  unsure (351): n=A,T,C or G
  unsure (394): n=A,T,C or G
  unsure (432): n=A,T,C or G
  unsure (467): n=A,T,C or G
ccagtggaatgatgttccctgcaattaccatctcacctatacgtgcaagaaaggaacagtcgcttgcggccagccccctgttgtagaaaatgccaagacctttggaaagatgaaacctcgttatgaaatcaactccctgattagataccactgcaaagatggtttcattcaacgtcaccttccaactatccggtgcttaggaaatggaanatgggctatacctaaaattacctgcatgaaccgtaagtggtcctttanaaagaatggactaccgtgctataacaactactagacaccttcattttacggctgtngtatcggcagtttanggtatggagcaagtaatattgngtgttttctttttttctttctttccttccatgtagcatctgcntaccaaaggacttattctatgaaatactttaaaaattnctcatcaacaaaggacaattcaataaatacatccnaacatgatca

SEQ ID NO: 8460 - DNA, 429 bp, Homo sapiens
  unsure (18): n=A,T,C or G
  unsure (20): n=A,T,C or G
  unsure (21): n=A,T,C or G
  unsure (38): n=A,T,C or G
  unsure (40): n=A,T,C or G
  unsure (72): n=A,T,C or G
  unsure (133): n=A,T,C or G
  unsure (165): n=A,T,C or G
  unsure (188): n=A,T,C or G
  unsure (224): n=A,T,C or G
  unsure (254): n=A,T,C or G
  unsure (312): n=A,T,C or G
  unsure (338): n=A,T,C or G
  unsure (374): n=A,T,C or G
  unsure (375): n=A,T,C or G
  unsure (399): n=A,T,C or G
ccaaaaaaaagaaggccntnntgacctgccacataatncnttggggaaagaaatctaatattcatagcacanaagaactcaaagaggataaaattctggaagccatggaatggtactcagaagtgcctgcggngaaacactccatatgcttttctcaaacacatntgttaaaaacaaatgtagttctnaaaaatattgagatgccatgttttaaatctctgcangacacaagaggccactcaggttttctaatnttatttgaacacaaaatatttaattttttgcatgtagagaataagaggtaatcattancctgaaaagagaggatttataatcancattatgcagaaagaaagcaaaattacaaataccanncctactcacatgaaaatttttcangtttacgctgatatatatctgagtgcttat

SEQ ID NO: 8461 - DNA, 423 bp, Homo sapiens
  unsure (395): n=A,T,C or G
  unsure (413): n=A,T,C or G
gcacgccctgcaagggaggtatccgttacagcactgatgtgagtgtagatgaagtaaaagctttggcttctctgatgacatacaagtgtgcagtggttgatgtgccgtttgggggtgctaaagctggtgttaagatcaatcccaagaactatactgataatgaattggaaaagatcacaaggaggttcaccatggagctagcaaaaaagggctttattggtcctggcattgatgtgcctgctccagacatgagcacaggtgagcgggagatgtcctggatcgctgatacctatgccagcaccatagggcactatgatattaatgcacacgcctgtgttactggtaaacccatcagccaagggggaatccatggacgcatctctgctactggccgnggtgtcttccatgggatngaaaatttca

SEQ ID NO: 8462 - DNA, 154 bp, Homo sapiens
  unsure (138): n=A,T,C or G
  unsure (143): n=A,T,C or G
agcagcagcttaaatatgaggcaagcagtcaggggttagccatgcctggggctgggttggggtcatgaggctacaggcacagactgtccccaggtggacagaagttggagcaggaagaggaggaggaaggggccgcanagcancctgggtcaga

SEQ ID NO: 8463 - DNA, 251 bp, Homo sapiens
ccagtcccagcagtctgactttttttttctttaagagacagggtctcactctgttgctcaggctggagtgtagtggcgcgatcatagctcgctgcagcctcaaactcctgggctccagtgatcctcccctcagcctcctgagtacaggtgcacgtcactgcagccagccagtctgacatcttgattccagggtggaaaacccttcttgtctccatggtaatggctgggctctcccaccctccaatagttca

SEQ ID NO: 8464 - DNA, 379 bp, Homo sapiens
ctgaaaaaaatcatgcagacatttgttacacagcagtggaaacagagcaaagaaaaatccaattgcctgcacaataaaaagttgtcagagaagaaagtgaagtctcccctgcatttattttctactttgcgcaggtcgccaagttatcctccccctggttgtggcaaaagcaaatccaaactgaaatctgagcaggacggaatctccaaaacgcataagctgctgcggaggacttgttccagcacagtcaagactgatgatgtgtgtgtcacaaagtcacacaggacctttggccgctccttgtccagcgatcccagggcggagcaggctatgacagcaattaaatcgcacaaacttttgaaccgtccttgccctgcag

SEQ ID NO: 8465 - DNA, 514 bp, Homo sapiens
cctttgagagatatgggcatagaattcaccctcaaaaagctcatgttctgattaaccacatcaacagttaagtaatatggaagtcaagtaacaaagacaataacacaactaattataaacaagacatataagcagtttaataccaccttagtgattctgattgactcatattgataacatattccacatggtcatgcacaataactccatttaccctaaatcatggattagtttccatcaaaacaccactccatttgagttttaaaattaaaagtattctccagcacaattacaggattttgaaaaccagaacacagtatagaaacataaaatatatataaaattaaccaaaattaaaataagacaatgtattaatagataatcatactataaacacacaatcactggctgaactagacaaggaaagggtaaattctttgagggcagggccttttccttgtcctgcagctaggaacaaagcacccagaacaacagatgtcatgggcttgataaa

SEQ ID NO: 8466 - DNA, 408 bp, Homo sapiens
  unsure (19): n=A,T,C or G
  unsure (222): n=A,T,C or G
  unsure (247): n=A,T,C or G
  unsure (378): n=A,T,C or G
ctgggagatgctggatacntattatttggagtggtgttatttgtttgggaactcttacctaccaccttagtcgtttatttcttccgagttagaaatcctacaaaggaccttaccaaccctggaatggtccccagccatggattcagtcccagatcttatttctttgacaaccctcgaagatatgacagtgatgatgaccttgcctggaacattgcccctcanggacttcagggaggttttgctccanattactatgattggggacaacaaactaacagcttcctggcacaagcaggaactttgcaagactcaactttggatcctgacaaaccaagccttgggtagcatcagttaacagttttatggacgattcctcanatgaaaagcttcagaaaagcatagtgacag

SEQ ID NO: 8467 - DNA, 136 bp, Homo sapiens
gcagtgaagcctctggacacacagagatcccccagcccagtgctctgccaggaatagacgtcggctcatctgtaatgtccccacaggattcttttaaggaaattcatgtaaatattgaagcgactttcaaaccatc

SEQ ID NO: 8468 - DNA, 470 bp, Homo sapiens
  unsure (95): n=A,T,C or G
  unsure (343): n=A,T,C or G
  unsure (424): n=A,T,C or G
  unsure (466): n=A,T,C or G
  unsure (468): n=A,T,C or G
ccagttcttagctgtggatcccaaagggcgagccgttatgattagtgccattgagaaacagaaattggtgtatattttgaacagagatgctgcancccgacttaccatttcatctcccctggaagcccacaaagcaaacactttagtgtatcatgtagttggagtagatgtcggatttgaaaatccaatgtttgcttgtctggaaatggattatgaggaagcagacaatgatccaacaggggaagcagcagctaatacccagcagacacttactttctatgagctagaccttggtttaaatcatgtggtccgaaaatacagtgaacctttggaggaacacggnaacttccttattacagttcctggagggtcagatggtccaagtggagtactgatctgctctgaaaactatattacttacaanaactttggtgaccagccagatatccgctgtccaattcccagnangc

SEQ ID NO: 8469 - DNA, 492 bp, Homo sapiens
  unsure (9): n=A,T,C or G
  unsure (13): n=A,T,C or G
  unsure (459): n=A,T,C or G
ctgtctgtnctanacaaggttaccaagtgcggaattggttaatactaacagagagatttgctccattctctttggaataacaggacatgctgtatagatacaggcagtaggtttgctctgtacccatgtgtacagcctacccatgcagggactgggattcgaggacttccaggcgcatagggtagaaccaaatgatagggtaggagcatgtgttctttagggccttgtaaggctgtttccttttgcatctggaactgactatataattgtcttcaatgaagactaattcaattttgcatatagaggagccaaagagagatttcagctctgtatttgtggtatcagtttggaaaaaaaaatctgatactccatttgattattgtaaatatttgatcttgaatcacttgacagtgtttgtttgaattgtgtttgttttttcctttgatgggcttaaaaganattatccaaagggagaaagagcagtatgccact

SEQ ID NO: 8470 - DNA, 429 bp, Homo sapiens
  unsure (245): n=A,T,C or G
  unsure (282): n=A,T,C or G
  unsure (289): n=A,T,C or G
  unsure (371): n=A,T,C or G
  unsure (416): n=A,T,C or G
  unsure (421): n=A,T,C or G
ccaaattccagcatgcctggttcaagagaagttcagatacacccggactcggatcaaatctcagggcttcatgggaattcatttcactctgaagatgaaattgaatatgaaaaccaaaaaaggctggaagaagaggaggacttgaatgtgcttacatttgaagatcttctttgctttgcatatcaagttgccaaaggaatggaatttctggaatttaagtcgtgtgttcacagagacctggccgncaggaacgtgcttgtcacccacgggaaagtggtgaanatatgtnactttggattggctcgatatatcatgagtgattccaactatgttgtcaggggcaatgcccgtctgcctgtaaaatggatggnccccgaaagcctgtttgaaggcatctacaccattaagagtgatgnctggncatatgga

SEQ ID NO: 8471 - DNA, 512 bp, Homo sapiens
  unsure (447): n=A,T,C or G
  unsure (450): n=A,T,C or G
cctgagatgaaatttaaagaatatgtagaatctaggtaagtggataaaaggtctgggggcaggggaaaggagagcatttcattgtgaatcaaggaatttctccacctgttttaactcttccatatgacatcaaagagatgtcacttgcagctagcatttcagtgatgttttcttactaataatatcgtgataaaagaaacattgactataagaaataggaatgggtctcataaaaggaaacagcaaaacccccaaactaaaaaacaacgcaggctatttctctcttctctccttttgcttggcactcatgagatgctaggtgtggaagtcagccaactgaaaaagagaggtggctgaagaaggtggggaggctgaagccagttaaataggatggtccaattcacagacggcgaggctacagtgcaaataggactctttcaacttgancangaccccattacttcactggagttagaaagaaaggagagcgtagactttttgaactttctata

SEQ ID NO: 8472 - DNA, 301 bp, Homo sapiens
  unsure (192): n=A,T,C or G
  unsure (246): n=A,T,C or G
cctgattatctaaaagctatttggaatgtaatcaactgggagaatgtaactgaaagatacatggcttgcaaaaagtaaaccacgatcgttatgctgagtatgttaagctctttatgactgtttttgtagtggtatagagtactgcagaatacagtaagctgctctattgtagcatttcttgatgttgcttantcacttatttcataaacaacttaatgttctgaataatttcttactaaacatttngttattgggcaagtgattgaaaatagtaaatgctttgtgtgattgaatctgattg

SEQ ID NO: 8473 - DNA, 449 bp, Homo sapiens
cctggctcaacaaaagggctggggattggccctgaaaggagagagctgactgtcctggctgatggacaggagatcctcttagcactaccctaaggcaggcagttgggcattggtgtagacaacaggaaagtccaggctatagccgtactcaaaaacctttctgttccctttctgccagccctagggattgagtccacattcagcacaggactctctgggtacagctctctttaggaagacacaaattgcatggtgaagtcagttatatcctggccgcctttggtccctcccaggaagacgggcatgttttctgcttgagaggtgctgatgtaccagttggggaactgggcagactcaaattccagcttgttattgatttctatcttgttgaagacaaatcgcttttccatcttcttctttgggtaatttttgggatctacactctccag

SEQ ID NO: 8474 - DNA, 428 bp, Homo sapiens
  unsure (52): n=A,T,C or G
  unsure (192): n=A,T,C or G
  unsure (207): n=A,T,C or G
  unsure (217): n=A,T,C or G
  unsure (264): n=A,T,C or G
  unsure (276): n=A,T,C or G
  unsure (396): n=A,T,C or G
tttttttttcaattaagctatttttatttaacatgtaatagtcataaagcanctccatatatttagttttctgatatcctaatgtatttccacaaaccttttaagtctacaattttatatagttttccatcagggaggcaagatatatataatttctttttatatttaactaaaggttttaagagggcttantctctaaatcagtancaattagtcntaacaccatacaaacacatttaaatattcaggaaagaggttgttaanattattgcttantcttataaaatggtgaattttaaccaaattgatacctctgtaatcttatttatgtttcctataacatcatactgcttggcaagtaatgtaagttttgacataatttaaaaattcaagtanttgtaaacaaattctaatttgttaaacaattc

SEQ ID NO: 8475 - DNA, 364 bp, Homo sapiens; identical to SEQ ID NO: 8232

SEQ ID NO: 8476 - DNA, 240 bp, Homo sapiens
  unsure (11): n=A,T,C or G
  unsure (16): n=A,T,C or G
  unsure (38): n=A,T,C or G
  unsure (55): n=A,T,C or G
  unsure (67): n=A,T,C or G
  unsure (71): n=A,T,C or G
  unsure (88): n=A,T,C or G
  unsure (119): n=A,T,C or G
  unsure (131): n=A,T,C or G
  unsure (143): n=A,T,C or G
  unsure (151): n=A,T,C or G
  unsure (152): n=A,T,C or G
  unsure (170): n=A,T,C or G
  unsure (210): n=A,T,C or G
  unsure (230): n=A,T,C or G
ctgctgttacnttcanagaataagagcaaccataactnacatcaagccaatttanattagactaatntaanttgtctaattaaattgnctctagatgagagcccaatctcatctagaantgaagaaatctntctattgacagntattagtnnaagaggttctaatacccngtgtaaggcagaaatatacattggagttagtctgtctgangtatgcagaacaaatggcantatcatgaag

SEQ ID NO: 8477 - DNA, 441 bp, Homo sapiens
  unsure (159): n=A,T,C or G
  unsure (194): n=A,T,C or G
  unsure (356): n=A,T,C or G
  unsure (371): n=A,T,C or G
ctgccgctgctcgttgttttttctgcaatgatatttgggactattacaaatcaagatctgcctgtgatcaagtgtgttttaatcaatcataagaacaatgattcatcagtggggaagtcatcatcatatcccatggtatcagaatccccggaagacctngggtgtgcgttgagaccccagagctcagggacagngtacgaagctgccgctgtggaagtggatgtatctgcttccatcacactgcaagtgctggtcgatgccccagggaacatttcctgtctctgggtctttaagcacagctccctgaattgccagccacattttgatttacaaaacagaggagttgtttccatggncattttgaaaatggnagaaacccaagctggagaatacctactttttattcagagtgaagctaccaattacacaatattgtttaca

SEQ ID NO: 8478 - DNA, 515 bp, Homo sapiens
ccagatgacctgttgtctaccaaagaaagctgggtagaagcaactcctagacaagttgtagagctctcagggagttcttcgattccaattacagaaggctctggagaagcagaagaagatgaagatacaatgttcaccatggtaactgatttatcacagagaaatactactgatacactcattactttagacactagcaggataatcacagaaagcttttttgaggttcctgcaaccaccatttatccagtttctgaacaaccttctgcaaaagtggtgcctaccaagtttgtaagtgaaacagacacttctgagtggatttccagtaccactgttgaggaaaagaaaaggaaggaggaggagggaactacaggacctgatcgctgcaaaatgaacccgtgccttaacggaggcacctgttatcctactgaaacttcctacgtatgcacctgtgtgccaggatacagcggagaccagtgtgaacttgattttgatgaatgtcactctaatccctg

SEQ ID NO: 8479 - DNA, 189 bp, Homo sapiens
  unsure (19): n=A,T,C or G
  unsure (27): n=A,T,C or G
  unsure (36): n=A,T,C or G
  unsure (118): n=A,T,C or G
  unsure (141): n=A,T,C or G
  unsure (166): n=A,T,C or G
  unsure (167): n=A,T,C or G
  unsure (169): n=A,T,C or G
cctgggtgatacatggcgnaagagaanattccaganacttatgccaggatcccaccataaaagagctggaatcgattataagcaaaaggaatattcaattttcctgcaagaatatctncagacctgacaagtttcttcagngtgtgaaaaatcctgaggattcatnntngcacatctgagatctgagcc

SEQ ID NO: 8480 - DNA, 272 bp, Homo sapiens
  unsure (212): n=A,T,C or G
agggcccaaggcagccccctgggttctccaaccactgcaagcaaggtctggggacaaccttgacaacccccagccttcttgctgggctggcgctgctgccactcaaataggacataggacaagcttgtctgacatcagctactggagttaaattatggctttataggactcaaacctgttgtttttcccaactctgttctctccctccaatncaacccctgccacagtgcatgggcaggctagccttgaatggactggacagacaccaacag

SEQ ID NO: 8481 - DNA, 349 bp, Homo sapiens
  unsure (32): n=A,T,C or G
  unsure (178): n=A,T,C or G
  unsure (268): n=A,T,C or G
  unsure (280): n=A,T,C or G
  unsure (325): n=A,T,C or G
  unsure (334): n=A,T,C or G
ccaggctcccaggtgacttacgttaatagcanacttctagttagaagaggagaatttatttcattaaaaaaaaaaaataagtcaaacagttcaagaaagtattcatttatgtaaaagaagtcaattggtatgttactaaagataataggaagaaaattagctcactattttagttgcntactgatgattttaaggtttaaataattaagatttaaatataccgtatgtaaatgtagaagtctgtatcgtaataaatctgttgctaagnaaaatgggaatncatgacaacgaggaatgtaggtattaaaaatgtcagaattagaangagaacagnaaaagagcaaaagct

SEQ ID NO: 8482 - DNA, 412 bp, Homo sapiens
  unsure (353): n=A,T,C or G
  unsure (372): n=A,T,C or G
  unsure (403): n=A,T,C or G
tgtacatgggggtaggccggggcacaaagcctgttcctaagactaacttgggaccaaggagccctgaggagttggggcacgggctccacagaaacatctaggcttcggtaaccaatgcacagtgacgctcccatgttgacttaaaaagcagataaaaacaaccaaacaaaaagtccctaccattgcacccctgtagtaggccgttgtgatcgtccgaaaccgttcctgaccggctgtgtccctaaacatgaagagaagggatattagcaacattaaaggaaaataactgtcctcagtaggagacaaggagcatctacccgggatgcctggctttctcaccgttcagccactgngataccttcttctgctaangcagcaccttctaatctccctattattacanggaaggaca

SEQ ID NO: 8483 - DNA, 445 bp, Homo sapiens
ctgaggaagctcttcattggagggttgagctttgaaacaactgatgagagcctgaggagccattttgagcaatggggaacgctcacggactgtgtggtaatgagagatccaaacaccaagcgctccaggggctttgggtttgtcacatatgccactgtggaggaggtggatgcagctatgaatgcaaggccacacaaggtggatggaagagttgtggaaccaaagagagctgtctccagagaagattctcaaagaccaggtgcccacttaactgtgaaaaagatatttgttggtggcattaaagaagacactgaagaacatcacctaagagattattttgaacagtatggaaaaattgaagtgattgaaatcatgactgaccgaggcagtggcaagaaaaggggctttgcctttgtaacctttgacgaccatgactccgtggata

SEQ ID NO: 8484 - DNA, 357 bp, Homo sapiens
ccaaaggcttccctcacgtgcaggtagggaatggtgtggtccaggaccgcttgcatgagccaggaatcttgcagtcttcaaagattagctcacaggtgttagagcccctcatccccagcttgtccagcttcttagaggtgctaaagccaggcatacccttctccacaatgaaggctgtgatgccccgagaagctggcacagcagccagatctgtcttggcatagacaatcaggacgtcagcatcagggccattagtgatccagaacttgttgccattcaggatgtagtgatttcctttcttttccgctttgagcttcatagagacaacatcagagcctgcattgggctcactcatgg

SEQ ID NO: 8485 - DNA, 494 bp, Homo sapiens
ccagaatagaagtgtcttatctaacctgaccagctcaaggtaaaagacctcaagaatcggacattggctgtgtctgtgtctccaaagaaaatgtcccagtcagctcaccctactgtgaaacccatattgaatccagaacttctatttagtttgtgtcctttttttctcataaacaaatttgttatagtcttactaagatataattggcatagaataaactttacacttaaagtgaaaaacttgagttctgaggcatgtatatatttccacagtcgccaccacagtcaggtaatcattcccctaaattttttgtgcctccttatcttccttcccttcccctaccccagctcctcctttcctcaggcagccccgatctgctttctgtcgctatagaataatttgacttttctggaattttatgtacatggaatcatacagtatgtgttcttttttggtctgacattcactcaccataattgagtttcatccatgtt

SEQ ID NO: 8486 - DNA, 505 bp, Homo sapiens
  unsure (432): n=A,T,C or G
ccaactaatttagttttgatgcactgtcagatagactaatcactgtctaagattttcctgaatctctgcttcatgttatgcttttcaaggagatgataatagcttgttaaccaccattcacagctcttcaactactcacaagccttcaagaactcaccttaaggagcccactgaatattaaatattaaacagctacaaaagagtgctactaagacaattttgctttgatgagctggataaaatcaagtcagaggttcagtataaactctgacaggactttaataattcctaatatgtatgaaatgaaaatgaaaatggtcaaaatcatttaggaactctcaatttttcaagactcgaagcaaattaaccatggactttatacttgtaattagttaagaagaaaagctattgcctaaaagcagttatgtgtgngtaattcttgacttcggatatctaatttcttctattccaaggtatttagttctaaggtaactaaaatagtaac

SEQ ID NO: 8487 - DNA, 469 bp, Homo sapiens
  unsure (179): n=A,T,C or G
  unsure (323): n=A,T,C or G
  unsure (402): n=A,T,C or G
  unsure (404): n=A,T,C or G
  unsure (444): n=A,T,C or G
ctgtctcttacttttaaccagtgaaattgacctgcccgtgaagaggcgggcataacacagcaagacgagaagaccctatggagctttaatttattaatgcaaacagtacctaacaaacccacaggtcctaaactaccaaacctgcattaaaaatttcggttggggcgacctcggagcanaacccaacctccgagcagtacatgctaagacttcaccagtcaaagcgaactactatactcaattgatccaataacttgaccaacggaacaagttaccctagggataacagcgcaatcctattctagagtccatatcaacaatanggtttacgacctcgatgttggatcaggacatcccaatggtgcagccgctattaaaggttcgtttgttcaacgattaaantnctacgtgatctgagttcagaccggagtaatccaggtcggnttctatctacttcaaattcctccct

SEQ ID NO: 8488 - DNA, 380 bp, Homo sapiens
  unsure (347): n=A,T,C or G
ctgatgatggacagtgaaactggtcgatccaagggatatggatttattacattttctgactcagaatgtgccaaaaaggctttggaacaacttaatggatttgaactagcaggaagaccaatgaaagttggtcatgttactgaacgtactgatgcttcgagtgctagttcatttttggacagtgatgaactggaaaggactggaattgatttgggaacaactggtcgtcttcagttaatggcaagacttgcagagggtacaggtttgcagattccgccagcagcacagcaagctctacagatgagtggctctttggcatttggtgctgtggcagatttgcaaacaanactttcccagcagactgaagcttcagctttagc

SEQ ID NO: 8489 - DNA, 544 bp, Homo sapiens
  unsure (20): n=A,T,C or G
  unsure (341): n=A,T,C or G
  unsure (356): n=A,T,C or G
  unsure (442): n=A,T,C or G
  unsure (456): n=A,T,C or G
  unsure (508): n=A,T,C or G
  unsure (530): n=A,T,C or G
  unsure (531): n=A,T,C or G
ccatcggtgctgaaattgancattttaaatagtacagtaggctggtatacattaggaaatggactgcactggaggcaaatagaaaactaaagaaattagataggctggaaatgcttactttctgctctcattttctttcattttgtctgctgtctttttgaatgccaatactttcatttaaaatgttttgggagcacggcaacccaaaatgactgaacggtggtccaaaaatccaaaccaactgataattacttctcaaggtgataggaaaggcacaggaagttaggactttggctgaaatgatgaaaacacatgttcgccattttagggatcagcgcctngactcctgccacctncggctccaacgatgatcatgtttggatgtatttattgaattgtcctttgctgatgaggaatttttaaagtatttcatagaataagncctttggtatgcanatgggttcatgcaggtaattttaggtatagcccatcttgcatttcctaagcnccggatagttggaaggtgacgnngaatgaaaccatc

SEQ ID NO: 8490 - DNA, 597 bp, Homo sapiens
  unsure (580): n=A,T,C or G
ccatataatttttagctacaaaagtttaagcaaaaacaaactctgcaatgatgtggaatagcagaaaagatcctttgcaggcaagagactctagcatatttacctatgtagttaacaggctgcagacctggttgctacatacctgtattgtgtatttcctcagcaatatacatgccttctcgataggttagtcccccgacaacaggagttcctgtggctggagccagtgtagggtcaaatgcatcaatatcaaaactcaaatggattggtctttgtctcctaaaaaggaagaggataaaataatacttaaaataatacttaactggttgtccttggacactcatccttcttatggttgcaactccttgattttgttgctattagtcctagtactttgttaataaagctgttaatacatttccaggcttcctattcttggaagttactgagattggcaatattaacttcctacataccacttcatgatactgccatttgttctgcatacctcagacagactaactccaatgtatatttctgccttacactgggtattagaacctcttatactaataactgncaatagagagatttctt

SEQ ID NO: 8491 - DNA, 173 bp, Homo sapiens
  unsure (13): n=A,T,C or G
  unsure (22): n=A,T,C or G
  unsure (24): n=A,T,C or G
  unsure (27): n=A,T,C or G
  unsure (35): n=A,T,C or G
  unsure (83): n=A,T,C or G
  unsure (103): n=A,T,C or G
  unsure (106): n=A,T,C or G
  unsure (109): n=A,T,C or G
  unsure (144): n=A,T,C or G
  unsure (156): n=A,T,C or G
aagaagatggaanagcgatttntnttnaacaaganagaaatcaataacaagctggaatttgagtctgcccagttccccaactngtacatcagcacctctcaancanaanacatgcccgtcttcctgggagggaccaaaggcggncaggatataacngacttcaccatgcaatt

SEQ ID NO: 8492 - DNA, 312 bp, Homo sapiens
  unsure (8): n=A,T,C or G
  unsure (17): n=A,T,C or G
  unsure (18): n=A,T,C or G
  unsure (33): n=A,T,C or G
  unsure (80): n=A,T,C or G
  unsure (96): n=A,T,C or G
  unsure (99): n=A,T,C or G
  unsure (105): n=A,T,C or G
  unsure (110): n=A,T,C or G
  unsure (148): n=A,T,C or G
  unsure (171): n=A,T,C or G
  unsure (177): n=A,T,C or G
  unsure (179): n=A,T,C or G
  unsure (195): n=A,T,C or G
  unsure (209): n=A,T,C or G
  unsure (219): n=A,T,C or G
  unsure (244): n=A,T,C or G
  unsure (254): n=A,T,C or G
  unsure (304): n=A,T,C or G
acaagctnttttttttnnttttttttttttttngctttgaaatgatttattcacctgggaaagtgatcacaacttgctgntaattaaaaccaacantanaacagngagtncaattgaagtccatcattgttattatcataaatatgcncccaacaaaaaacaaactaaaanaaaatncnctcaaaagcacacagngggcacattttgtntttgggtagnggaagtgtaggtaatgtcagtgttnggggtttttntttgaatttttaagctgttttaaaaataagttttgttattaggaaaattntttttaaa

SEQ ID NO: 8493 - DNA, 343 bp, Homo sapiens
  unsure (9): n=A,T,C or G
  unsure (10): n=A,T,C or G
  unsure (134): n=A,T,C or G
  unsure (304): n=A,T,C or G
  unsure (323): n=A,T,C or G
  unsure (327): n=A,T,C or G
  unsure (330): n=A,T,C or G
  unsure (336): n=A,T,C or G
ccagcaatnnaaggaggctcgaaagtttcttttataagaatgcctgctagcaagggttccagcaaggtggttggttggtctgtaagtcagtcttgagtacttgaaacagttctgtgtttgttttttttccttancgtttagaatagccatcattgtccggcaataggcagagctatcacgtccaggaaaaatgagggagggaaccacagaggcagcgtgagatccaaatacagcattcaaaggtaattggtccagtggtgcctggggagggaggaagggtgatactccagggttagccgtcttnttttgggggtgtgtaccanccgnttntttcgnggatctg

SEQ ID NO: 8494 - DNA, 550 bp, Homo sapiens
  unsure (9): n=A,T,C or G
  unsure (10): n=A,T,C or G
  unsure (393): n=A,T,C or G
  unsure (402): n=A,T,C or G
  unsure (408): n=A,T,C or G
  unsure (414): n=A,T,C or G
  unsure (423): n=A,T,C or G
  unsure (424): n=A,T,C or G
  unsure (537): n=A,T,C or G
ccacgagannattgtgaacctgctgggggcgtgcacactgtcaggaccaatttacttgatttttgaatactgttgctatggtgatcttctcaactatctaagaagtaaaagagaaaaatttcacaggacttggacagagattttcaaggaacacaatttcagtttttaccccactttccaatcacatccaaattccagcatgcctggttcaagagaagttcagatacacccggactcggatcaaatctcagggcttcatgggaattcatttcactctgaagatgaaattgaatatgaaaaccaaaaaaggctggaagaagaggaggacttgaatgtgcttacatttgaagatcttctttgctttgcatatcaagttgccaaaggaatggaatntctggaatntaagtngtgtgntcacagagnnctggccgccaggaacgtgcttgtcacccacgggaaagtggtgaagatatgtgactttggattggctcgagatatcatgagtgattccaactatgttgtcaggggcaatgcccntctgcctgtaaaa

SEQ ID NO: 8495 - DNA, 574 bp, Homo sapiens
ccttatgaaggacattgtaggagccaatgagaaagaaatagccctaatgaatgctttgactgtaaatttacatcttctaatgttatcattttttaagcctacgccaaaacgatataaaattcttctagaagccaaagccttcccttctgatcattatgctattgagtcacaactacaacttcacggacttaacattgaagaaagtatgcggatgataaagccaagagagggggaagaaaccttaagaatagaggatatccttgaagtaattgagaaggaaggagactcaattgcagtgatcctgttcagtggggtgcatttttacactggacagcactttaatattcctgccatcacaaaagctggacaagcgaagggttgttatgttggctttgatctagcacatgcagttggaaatgttgaactctacttacatgactggggagttgattttgcctgctggtgttcctacaagtatttaaatgcaggagcaggaggaattgctggtgccttcattcatgaaaagcatgcccatacgattaaacctgcattagtgggatggtttggacctgcc

SEQ ID NO: 8496 - DNA, 366 bp, Homo sapiens
  unsure (18): n=A,T,C or G
  unsure (26): n=A,T,C or G
  unsure (43): n=A,T,C or G
  unsure (65): n=A,T,C or G
  unsure (139): n=A,T,C or G
  unsure (148): n=A,T,C or G
  unsure (154): n=A,T,C or G
  unsure (179): n=A,T,C or G
  unsure (196): n=A,T,C or G
  unsure (205): n=A,T,C or G
  unsure (225): n=A,T,C or G
  unsure (228): n=A,T,C or G
  unsure (245): n=A,T,C or G
  unsure (256): n=A,T,C or G
  unsure (259): n=A,T,C or G
  unsure (269): n=A,T,C or G
  unsure (281): n=A,T,C or G
  unsure (316): n=A,T,C or G
  unsure (320): n=A,T,C or G
  unsure (331): n=A,T,C or G
  unsure (345): n=A,T,C or G
  unsure (349): n=A,T,C or G
ctgttcttagaaagcatnccatatanttatccagagcactcangttttggttctcttttacatanctgcattcggagatactctatgtgagacatgtttaaaaaaagagaaacatttatacctggaatttatattcttncaagtaatnttttantcttgttggtaaaggcagtccccanatggcaccggtacattngttaatggngagcctacagagatgctgcnganatggtgctgacgtgtanagcggtttggncanataaaggtgnacagtgccgttncggggggcttctggacctgtccgcttatccttgcncatntgaacatagtngtcgatcagatganccanactgtcaaattgtttaa

SEQ ID NO: 8497 - DNA, 504 bp, Homo sapiens
cgaggtccttcttcactgaagagtatgtcagggaccaccctgaggaccaggacaagctgacccacctcaaggacctgattgcatggcagatccccttcttgggagctgggattaagatccatgagaaaagggtgtcagataacttgcgacccttccatgaccggatggaggaatgtttcaagaacctgaaaatgaaggtggagaaggagtacggtgtccgagagatgcctgactttgacgacaggagagtgggccgtcccaggtctatgctgcgctcatacagacagatgtccatcatctctctggcttccatgaattctgactgcagcacccccagcaagcctacctcagagagctttgacctggaattagcatcacccaagacgccgagagtggagcaggaggaaccgatctccccggggagcaccctgcctgaggtcaagctgcggaggtccaagaagaggacaaagagaagcagcgtagtttttgcggatgagaaagcag

SEQ ID NO: 8498 - DNA, 455 bp, Homo sapiens
  unsure (348): n=A,T,C or G
ccaccaccagctttggctctaactgcagactttgttcttggtgaattgctatagaactgggaatgaggtgtgccctgggcacaggggcactgccccaccaaggtggtgcccactccactgctgggaaaacgaagttacctagcggagcctggagcccactgggtggtcactaatttcagcacaggcagtgcagtgtttgtgctttttttttggagatggagtctcactctgtcacccaggctggagtgcaatggcgtgatctaggctcactgcaacctccgcctcccaggttcgagcaatcctcctgcctcagcctcccaagtagctgggactacaggcacacgccgncacgcctggctagtgtttgctcttaaatacacaaaatgcactgaaccagcaaaaacaaagtcccaggtctgaggagctctgaggatgatgcctgtgatggcctctgg

SEQ ID NO: 8499 - DNA, 544 bp, Homo sapiens
ggacgggcccggtgcggctgtgtgggttcgggagcggagttgcagaatccaaggacccgttttgttctttctccgcactgctttatgggaggcattatggcccccaaagacataatgacaaatactcatgctaaatccatcctcaattcaatgaactccctcaggaagagcaataccctctgtgatgtgacattgagagtagagcagaaagacttccctgcccatcggattgtgctggctgcctgtagtgattacttctgtgccatgttcactagtgagctctcagagaaggggaaaccttatgttgacatccaaggtttgactgcctctaccatggaaattttattggactttgtgtacacagaaacggtacatgtgacagtggagaatgtacaagaactgcttcctgcagcctgtctgcttcagttgaaaggtgtgaaacaagcctgctgtgagttcttagaaagtcagttggacccttctaattgcctgggtattagggattttgctgaaacccacaattgtgttgacctgatgcaaacag

SEQ ID NO: 8500 - DNA, 289 bp, Homo sapiens
  unsure (8): n=A,T,C or G
  unsure (18): n=A,T,C or G
aatcaacntatagtttanttttttctgggtttttgttttgttttgttttctttctaatcgaggtgtgaaaaagttctaggttcagttgaagttctgatgaagaaacacaattgagattttttcagtgataaaatctgcatatttgtatttcaacaatgtagctaaaacttgatgtaaattcctcctttttttccttttttggcttaatgaatatcatttattcagtatgaaatctttatactatatgttccacgtgttaagaataaatgtacattaaatcttggtaaaa

SEQ ID NO: 8501 - DNA, 303 bp, Homo sapiens
ccgggcaggtcaagagtgagccattctccatccctgaggacgacggcaatgacctcactcacaccttcttcaatccagaccgggagggttggctgctcaagctagggggccgcgtgaagacgtggaaacggcgctggttcatcctgaccgacaactgcctctactacttcgagttcaccactgacaaggagccacggggaattatacctcttgagaacctctcggtgcagaaggtggatgaccccaagaagccattctgcctggagctctacaaccctagctgccgaggccagaaaatcaagg

SEQ ID NO: 8502 - DNA, 341 bp, Homo sapiens
ctgcccaagggcgttcgtaacgggaatgccgaagcgtgggaaaaagggagcggtggcggaagacggggatgagctcaggacagagccagaggccaagaagagtaagacggccgcaaagaaaaatgacaaagaggcagcaggagagggcccagccctgtatgaggaccccccagatcagaaaacctcacccagtggcaaacctgccacactcaagatctgctcttggaatgtggatgggcttcgagcctggattaagaagaaaggattagattgggtaaaggaagaagccccagatatactgtgccttcaagagaccaaatgttcagagaacaaactaccag

SEQ ID NO: 8503 - DNA, 514 bp, Homo sapiens
  unsure (10): n=A,T,C or G
  unsure (58): n=A,T,C or G
  unsure (137): n=A,T,C or G
  unsure (177): n=A,T,C or G
  unsure (207): n=A,T,C or G
  unsure (352): n=A,T,C or G
  unsure (357): n=A,T,C or G
  unsure (389): n=A,T,C or G
  unsure (391): n=A,T,C or G
  unsure (393): n=A,T,C or G
  unsure (399): n=A,T,C or G
  unsure (429): n=A,T,C or G
  unsure (491): n=A,T,C or G
gaaatcgaantgttgaatttttggcttgtgagagtttggttccaaaccttaaattcantcaaggtctgtgtctttgttagttacaaaactttaactttattcaaattgatgagctcttgaataattgataatatagnataaatgaaaattaaattctactaaaatctattgaagcangaaaaaaagagcgctatggaccttgactancagagtaatttcccctgttctgttgttcactttctcataaatgttcattagtaggtaaaaattgcaggggatgatataaactgatgcatctgttttgcaataacatatctaatcttctgctccaggagacgttcacagaatttgncagcnaaacctaatacatattcataaccaatatgctntntnaccaanggaaattgaggcaagtacaacagaatgaancatgagaaaccagcatgttaattttaaatttaattatagttataggggaaaaggctgcattntgatagtgtatactcattcagac

SEQ ID NO: 8504 - DNA, 610 bp, Homo sapiens
ctgtcaccaccaagcatgaactttcactgattacccataacctactggaaatcttcagccttgctgtcagcatagaccactgtgagaaacagtacattccattccagtttgccctgctttttgaagatctaaatgccattccatgttttctgttacatattgaagtttcttggttgccaaagaaaaacggattctgctgaacttgtggacagaacaaccccaaggttggaagaaaaaggaaaaataatctatacttgaacatttcaaaagttaaaattttcaacagagttttaacacactgaagcttaaaatacattgacactgaaatgtcaatgggcaaacaccaatttcgccgttcattatgaaatacatcaaacaaaacttgccaaaaatacaaccataaaaatatagcaaatgtatgtatgagcaaactaatgctaaaaatgtctaattttcttggctagtctttcaaggaccagattcatgagtgttatttgaagggaaaaagtgaaatacttggaattattttgagtgatgtgctcctgagcttgttcttaaaatctaccagtggtagcttttggaaagaatgtgtttcataccgatgtgcagg

SEQ ID NO: 8505 - DNA, 285 bp, Homo sapiens
ccacagtgtcaacctgagtggagaaccacgagttctcaccccggtagttgggagtaaggtccagaatgacacggatgctcttttttttagccgattgcaagagactgtcaaaatcttccttggagccaaaattggggtcgatctgcagcaagtcagtctgagcgacatcatccttctggttcttgtgaattggacccagcacaaggcccttcaccttcagagagctcaggtaatcgagacgccccttcagacccgccaggttgcccgcgccgtggccctggaagg

SEQ ID NO: 8506 - DNA, 242 bp, Homo sapiens
  unsure (9): n=A,T,C or G
  unsure (11): n=A,T,C or G
  unsure (36): n=A,T,C or G
  unsure (107): n=A,T,C or G
  unsure (133): n=A,T,C or G
  unsure (161): n=A,T,C or G
  unsure (181): n=A,T,C or G
  unsure (187): n=A,T,C or G
  unsure (197): n=A,T,C or G
  unsure (222): n=A,T,C or G
  unsure (230): n=A,T,C or G
  unsure (237): n=A,T,C or G
actgacgancnggtcacataatcaggagccagactnctgagttgtaactgggcccccaactttccgtgtgattattaaaagagcccttcttcttttctaaaacttantgccaaatgctgaggagcataatgtnggtgagaattttttttttttgggggggngaaaattaagctagagcttnttgaantacctagttnccaggggctttttattgtatttttncttatggncctagantgaca

SEQ ID NO: 8507 - DNA, 554 bp, Homo sapiens
  unsure (501): n=A,T,C or G
tttttttttatcgttaacaaaagaaaaaaatgtctttataagtacataccttttgtcgtcaaaaaaaatatagaaacacaatgtattcaaaaaaaatcaaaattatacagccatgtttatgaagtctacatttcccttgtcttggatatatatatatggagatatatatacaattcaagcagttttaattaagggtaatcattgggtttttctgaaaccggaaaagtcacgagtctctctcttttttcactttcacatctccagcaaggatggttgcaatttccccttgcataaaggcccaggggacattggagcccacaagagggcatttttccccactgggacaatagacctctccactagctccctgctgtttgatgctttgtctggagcaagggaagcagaacttgtgcgaagggacggacgggcactgcacaaaatgggtgtcctccagccgctcgtggcagagggtgcagcacagcggggcactggttgccaganaggagtccgggaggctggcagggtgcactggctccagtcctcctgtgttgcct

SEQ ID NO: 8508 - DNA, 449 bp, Homo sapiens
ctggagagtgtagatcccaaaaattacccaaagaagaagatggaaaagcgatttgtcttcaacaagatagaaatcaataacaagctggaatttgagtctgcccagttccctaactggtacatcagcacctctcaagcagaaaacatgcccgtcttcctgggagggaccaaaggcggccaggatataactgacttcaccatgcaatttgtgtcttcctaaagagagctgtacccagagagtcctgtgctgaatgtggactcaatccctagggctggcagaaagggaacagaaaggtttttgagtacggctatagcctggactttcctgttgtctacaccaatgcccaactgcctgccttagggtagtgctaagaggatctcctgtccatcagccaggacagtcagctctctcctttcagggccaatccccagcccttttgttgagccagg

SEQ ID NO: 8509 - DNA, 391 bp, Homo sapiens
cctaagacccaacagatgtaggatccagatctggattcgtgccagccccaccaatggtctgtcaggccaagaaggtgctttctttggtaattcatgttttttaacttcctggagaagagatcttttcccacaagccatcttcattttttttgtagagtagggctttatttccaggaaacagtgtgttagctggagatgggtgtttttttaaaaacatcaaggtagatctaatatgttcaacaaagtggggtggctcagccagaggcgaagtggaaagattctctagtatttgcttgtcatcttggtgcaaccagaaatccacatgtggaaatggtgtccaggagtacggtcctatacgaagttgttctgtctctgcatcataaatgctaat

SEQ ID NO: 8510 - DNA, 335 bp, Homo sapiens
  unsure (8): n=A,T,C or G
  unsure (10): n=A,T,C or G
  unsure (17): n=A,T,C or G
ctgtggcngnctgtcanagaagcacatttttctgcagataattagaatggcttcccccatctctcacggactgtcccaagtctagaaaagaattgagttcctcttctattagtcaaataaaagggaagagaatgtttgtcttcctttcctttctgtagtgttaagaaaataaacgaacttaatgattctaaattatcagtgagcttaacactgtactatagaccaaagattaccttttcaaaaagtcctttgaggtgaaatattttgtatacgtaatacatagatgcacatataaacacacacatatagaatctcaatattttaacacttctttg

SEQ ID NO: 8511 - DNA, 604 bp, Homo sapiens
ccactcattctactgcttagctcacagtgtttctgcagcggtatgtctcaccacttgttctgttgttccccttacacactccagtatgtatctctgccatcaaactgtccacgtgtgagctgaacctgctatttgttcattaacttactgttttataccatttgagcaggaagttgtagtcattctctggctttgtagtttgctttattgctcataagtaataactggaaaaaggagttttaaaacactcattattttcaaacattttgactaatatttattctgaaatgtcagggtaatttggtaaaatatcaaaatgctaaaactgaagacttatttttttctttaccagaaagtaataattacatatatttataactgcagagtccaatacaatgaattaatatttcttccaaatgttcttacttaacatctttctagctttagcaaagcagtatcttactttcacattaaaaaaaagaaacccttcataatagtgtaaggcagtttgtggaaaacttattaccgtcattttacactttactaaattcaggctaaaccatcatcaaattaaccagaattaagattagggctcaagtcttct

SEQ ID NO: 8512 - DNA, 529 bp, Homo sapiens
  unsure (2): n=A,T,C or G
  unsure (222): n=A,T,C or G
  unsure (256): n=A,T,C or G
  unsure (282): n=A,T,C or G
  unsure (283): n=A,T,C or G
  unsure (323): n=A,T,C or G
  unsure (368): n=A,T,C or G
  unsure (429): n=A,T,C or G
  unsure (473): n=A,T,C or G
  unsure (485): n=A,T,C or G
gnaaatattccaaaattaactgtggtgacagatgcacttacctgtgactacactaaaagccactgaattgtacacataaaatgggtgaattttaagatatgtgaattatatctcaataatgttatttttaataatgctgttattaagattttgattgggattaaattgggatctatagatttggagaaaacatgtatgtttataatattgattctttcaatncatgaacattatataatgctccaattatttgggncttctttagtttctctcaataatgtnntatagaattccatgcagaagtactgtacatattttattanagtcattcctcgatatttactattactgatgctatttatatggtntattttaaagaagacaaagcattgaatttttttattgtggggaagaacagagcatggtgtncatattaaataatcaaaatttcaaaataaatcactatacatggnctaacatgattntttctgattttaaattttatttacagaaaagtcatacaaatata

SEQ ID NO: 8513 - DNA, 592 bp, Homo sapiens
  unsure (573): n=A,T,C or G
caaagatattccagccagggtaaccctgatgcagctccctaccaggcaagagatccgagtgaggaacctgttcaatgtggtggactgcaagctccattggcagaagaacggagactacttgtgtgtgaaagtagataggactccgaaaggcacccagggtgttgtcacaaattttgaaattttccgaatgagggagaaacaggtacctgtggatgtggtcgagatgaaagaaaccatcatagcctttgcctgggaaccaaatggaagtaagtttgctgtgctgcacggagaggctccgcggatatctgtgtctttctaccacgtcaaaaacaacgggaagattgaactcatcaagatgttcgacaagcagcaggcgaacaccatcttctggagcccccaaggacagttcgtggtgttggcgggcctgaggagtatgaacggtgccttagcgtttgtggacacttcggactgcacggtcatgaacatcgcagagcactacatggcttccgacgtcgaatgggatcctactgggcgctacgtcgtcacctctgtgtcctggtggagccataaggnggacaacgcgacctcggcc

SEQ ID NO: 8514 - DNA, 591 bp, Homo sapiens
tgatcagcccctaaaggtaatgccagcccctccaccaaaggagaatgcttgggtgaagcgaagttctaaccctcctgctcgatctcagagctcagacacagagcagcagtcccctacaagtggtgggggaaaagtagctccagctcaaccatctgaggaaggaccaggaaggaaagatgaaaataaagtagatgggatgaatgccccaaaaggccaaactgggaactctagccgtggtccaggagacggagggaacagagaccactggaaggagtcagataggaaagatggcaaaaaggatcaagactccagatctgcacctgagccaaagaaacctgaggaaaatccagcttctaagttcagttctgcaagcaagtatgctgctctctctgttgatggtgaagatgaaaatgagggagaagattatgccgaatagacctctacatcctgtgcttttctcctagtttctctccaccctggaacattcgagagcaaatcaaaacctctatccagacaagacaaaataaaactcaacatctcctgaagacctttcttacctttttttaaaaacaaaaaatgaaattattttgc

SEQ ID NO: 8515 - DNA, 476 bp, Homo sapiens
  unsure (16): n=A,T,C or G
  unsure (40): n=A,T,C or G
  unsure (53): n=A,T,C or G
  unsure (108): n=A,T,C or G
  unsure (132): n=A,T,C or G
  unsure (139): n=A,T,C or G
  unsure (140): n=A,T,C or G
  unsure (145): n=A,T,C or G
  unsure (185): n=A,T,C or G
  unsure (206): n=A,T,C or G
  unsure (265): n=A,T,C or G
  unsure (395): n=A,T,C or G
  unsure (399): n=A,T,C or G
  unsure (421): n=A,T,C or G
  unsure (461): n=A,T,C or G
tgctgcctcacatcancatgttgtcaggatcttgcatcantattgagcaccanccattccctgaccagactctatgtgggggagaatgccttgggagactcaggagtngcaattttatgtgaaaaagccaanaatccanngtgtnacctgcagaaactggggttggtgaattctggccttacgtnagtctgttgttcagctttgtnctcggtactcagcactaatcagaatctcacgcacctttacctgcgaggcaacactctcngagacaaggggatcaaactactctgtgagggactcttgcaccccgactgcaagcttcaggtgttggaattagacaactgcaaccttacgtcacactgctgctgggatctttccacacttctgacctccanccanagcctgcgaaagctgagcctgngcaacaatgacctgggcgacctggggtcatgatgttctgngaagtgctgaaacag

SEQ ID NO: 8516 - DNA, 616 bp, Homo sapiens
  unsure (10): n=A,T,C or G
ctcaaatgcngtcggcttgtcctggctcttgccctcatcctggttctggaatcctcagttcaaggttatcctacgcagagagccaggtaccaatgggtgcgctgcaatccagacagtaattctgcaaactgccttgaagaaaaaggaccaatgttcgaactacttccaggtgaatccaacaagatcccccgtctgaggactgacctttttccaaagacgagaatccaggacttgaatcgtatcttcccactttctgaggactactctggatcaggcttcggctccggctccggctctggatcaggatctgggagtggcttcctaacggaaatggaacaggattaccaactagtagacgaaagtgatgctttccatgacaaccttaggtctcttgacaggaatctgccctcagacagccaggacttgggtcaacatggattagaagaggattttatgttataaaagaggattttcccaccttgacaccaggcaatgtagttagcatattttatgtaccatggttatatgattaatcttgggacaaagaattttatagaaatttttaaacatctgaaaaagaagcttaagttttatcatccttttttttctcatgaat

SEQ ID NO: 8517 - DNA, 294 bp, Homo sapiens
  unsure (28): n=A,T,C or G
  unsure (33): n=A,T,C or G
  unsure (46): n=A,T,C or G
  unsure (112): n=A,T,C or G
  unsure (138): n=A,T,C or G
  unsure (140): n=A,T,C or G
  unsure (194): n=A,T,C or G
  unsure (201): n=A,T,C or G
  unsure (224): n=A,T,C or G
  unsure (233): n=A,T,C or G
acgtgaaaatgctacagttatggataanacccnagctttgattgantccgttattccgaaaggggcacaggcatgccaaatttgcatcacatacatttgtgaagaagacagntacctggcagagacgctgggactctnancagctcttcaggcagtgcaggacaacccagctatgcccacatgctcaagcccanaaggcanaatcaagctttgctttctagaanacgctcaanggatatggaaacaaaagttgcagaggtgccatgttcagaatacaataataaagtggagcga

SEQ ID NO: 8518 - DNA, 580 bp, Homo sapiens
  unsure (8): n=A,T,C or G
  unsure (9): n=A,T,C or G
  unsure (11): n=A,T,C or G
  unsure (18): n=A,T,C or G
  unsure (19): n=A,T,C or G
  unsure (119): n=A,T,C or G
ctggtttnnanttctaanngtataaaaattggaaatttgaaatagttctgtaaaagaaaaaaatgtaaaaatacatctgctttctctcatggtttaatacagcattggaaggctttcanatgttttcttaaaaaaaaacaaaacccaaaaaaactcaacatttaaaaccaaatctcagcttcatttccagaaatattgcagtttggtttaggtaatgtttcatttaatctactccagtttccacaaaatggcattttattaaaaaaacctttcagttatttggtccttttgcaatttgctgtgcacataatgcctactgtaccaaacttttattgcctttaaatttagttgtaattttattgataaaatttaaatctagtgtctttatttcttctgttacaatagtgttgcttgtgtaagcaggttagagtgcacagtgtccccaattgttcctggcactgcaaaaccaaattaaacaattccacaaagaattctgacatcaatgtgttttcctcagtcaggtctatttcaagattctagaagttccttttgtaaaacttgcctttaaaactcttcctcc

SEQ ID NO: 8519 - DNA, 332 bp, Homo sapiens
ctgccacaaaccaggtgaagctttgttctaagaatatttgtttcatctagtttatgagtccaaatgatatagactgtaaatgtcacagcagtggtgaaagactgctcggtcatgagcaccgacagtaactcactggcacgtgaatttctgaccgatgtcaaccggctttgcaatgcagtggtccagagggtggaggccagggaggaagaagaggaggagacgcacatggcaacccttggacagtaccttgtccatggtcgaggatttctattacttaccaagctaaattctataattgatcagtagagatggggtttcaccgtgttgaccag

SEQ ID NO: 8520 - DNA, 587 bp, Homo sapiens
  unsure (574): n=A,T,C or G
cctaaggctgatgaggaagaggaagtgtcagatgaagtcgatggggcagaggtccctaaccccgactcagtcacagatgacctcaaggtcagtgaaaagtcagaagcagcagtgaagctgaggaacacagaagcatcttcagaagaagagtcatctgctagcaggatgcaggtggagcagaatttatcagatcatatcaaactctcaggtgagaagatggttgattaggtttcacatataagtagtaggtggttgatgatcagatgtcttaaatggatgttcactatgacaagtatctgactagtccacatagcttaatcagtaatctaccaaagtcatgggtaactcaaccaatagtcccagggaatattgtaaaagtcaggagcctcactgctatgtgtagcagaattgtgagacaagcagccagcagtgcctatttggtttaataaaaaagaagattctaaaatgagtttttttttttcgtgcaactcaatttacaatatacgtttttggaaggcttcttttgaattcacatgagtagagaaaaccaattatagataattctttgtagatncttagctttcgac

SEQ ID NO: 8521 - DNA, 647 bp, Homo sapiens
  unsure (561): n=A,T,C or G
ccatcatctccaactctttaccccaacctggcaccttgtagggggctagaagggtgaggggaggtgtctttcacttatgcttaggtcactcttagaggactatcctcaaacttgaggtgacagggaactcttcacgggggcaggatttgatgttttgtttttagccatgtttgtcaatgacaatgtcaatttctagttccaatttgtacccttgtctcatttctacattaaaaacaaaaaacaatcatctgtcataaaagttcagagtaagctgggtgtggtggcacatgactttagtcccagctacttggggggctgaggcaggagggtcgcttgagcccaggaaagttcgagtccaagctgggcaacagagcaaaaccttgtctcttaaaaaagaaaaaaaatagagttcagaatagataaaagagttgttattctaagaaaatagactactgaaggagaaaggctttaataatattaaaaataggcaaggtaatgcttttcatagtatagtaagatttgcctaataccatcttatttctttgattaaaagttacttancttcagcatgcgtgtacattcaaaatacaaaattaaagcatgagttgtcattaatttgcagaattctatgattgaagcctctaaat

SEQ ID NO: 8522 - DNA, 474 bp, Homo sapiens
ccatataatacttgcacattatgcaaaaaaaaatgttgatagtatctccttgccacacaatatgcagagttgacaacctttgaaaaccaaggtaactaatatgtttgtcctagttgtgtggcgcttggtaacaaagtctgtacatattatgtataaaatgtgtattggttagcatttagtactaagaaattctgagtttaaaataagtgatttttttcaaagtagcgatatctatatctgtgtttatctaaaaatactggcttgaatagaaaacattctcagatgattcaagattgagtaaaaatgagaatcccatacattccattattaaattctgccctattcccaattgttagcatctggctgatattaaggtctttgattgtcacaatattctcaataaatgagacattctgaactgcctggtgatattttcaaaaagagcaattaaaatgtgtattccctctaatacag

SEQ ID NO: 8523 - DNA, 568 bp, Homo sapiens
  unsure (9): n=A,T,C or G
agctagacnaagttggtcatgatgcagaagctactcaaatgcagtcggcttgtcctggctcttgccctcatcctggttctggaatcctcagttcaaggttatcctacgcagagagccaggtaccaatgggtgcgctgcaatccagacagtaattctgcaaactgccttgaagaaaaaggaccaatgttcgaactacttccaggtgaatccaacaagatcccccgtctgaggactgacctttttccaaagacgagaatccaggacttgaatcgtatcttcccactttctgaggactactctggatcaggcttcggctccggctccggctctggatcaggatctgggagtggcttcctaacggaaatggaacaggattaccaactagtagacgaaagtgatgctttccatgacaaccttaggtctcttgacaggaatctgccctcagacagccaggacttgggtcaacatggattagaagaggattttatgttataaaagaggattttcccaccttgacaccaggcaatgtagttagcatattttatgtaccatggttatatgattaatc

SEQ ID NO: 8524 - DNA, 591 bp, Homo sapiens
  unsure (8): n=A,T,C or G
  unsure (16): n=A,T,C or G
  unsure (446): n=A,T,C or G
gttcaatnaagacagngtggctaggaaatccctggaaggactcccaccactaagacttgtcaaaaattcttcaaacagtacttgcagaggccctgaaatttctgggacttctataaaatccctccctgggcttgaaaaaataattttgaatttgggcagtctagagccttagagagctaagagctgatagtagctctatcagagtaaactcaaaaacaaacacacggggggtctctagggctctctggctggtggcttcatgggtacataagcctgtctttccaccaaggaatctggcttgggatgcttattcatatttgaatcacgaaagcccaccatttaaataatatttggtaaagatcttttaggttaattagatcttacatatacttttgcaaaagctacctctggatcatttctagtattactagcatttcagatattgnttataactatcacccttgtagatattacactaaattaaaacaatagtgatacaaattcccaccttaccaaaatagcaataatccaatttatttcctagtttatttaatcagattctcctaccaaccatctcctcttctatttttt

SEQ ID NO: 8525 - DNA, 581 bp, Homo sapiens
  unsure (10): n=A,T,C or G
  unsure (41): n=A,T,C or G
  unsure (269): n=A,T,C or G
  unsure (490): n=A,T,C or G
cctgaatttnaaccttcactggaggttttactatgatcctnctgagttccagaccattattattggagataataaaactcagtaccacatggggtatttcagggattctcctgatgaatttcctgtatatgttggtataaatgaagcaaagaaaaattgtataattgttccaaatggagataatgtatttgctgcagtcaaattatttttgacgaaaaaacttaaagaaataacggataaaaagaaaatcaatctcttgaaaaacatanatgaaaaactcacagaagcagccagagaattggggtactcgcttgaacagagaaccgtgaagatgaaacagagagataagaaagttgtgacaaagacctttcatggtgcaggcttggttgttccagtagataaaaatgatgttgggtaccgagagctccctgaaacagatgctgacctcaagagaatttgcaagacaatagttgaggctgcaagtgatgangagagactaaaagcttttgctcccattcaggaaatgatgacttttgtgcagtttgctaatgatgaatgtgattatggcatggggcttgaat

SEQ ID NO: 8526 - DNA, 549 bp, Homo sapiens
  unsure (8): n=A,T,C or G
  unsure (10): n=A,T,C or G
  unsure (482): n=A,T,C or G
ctagactnanttggtcatgatgcagaagctactcaaatgcagtcggcttgtcctggctcttgccctcatcctggttctggaatcctcagttcaaggttatcctacgcagagagccaggtaccaatgggtgcgctgcaatccagacagtaattctgcaaactgccttgaagaaaaaggaccaatgttcgaactacttccaggtgaatccaacaagatcccccgtctgaggactgacctttttccaaagacgagaatccaggacttgaatcgtatcttcccactttctgaggactactctggatcaggcttcggctccggctccggctctggatcaggatctgggagtggcttcctaacggaaatggaacaggattaccaactagtagacgaaagtgatgctttccatgacaaccttaggtctcttgacaggaatctgccctcagacagccaggacttgggtcaacatggattagaagaggatnttatgttataaaagaggattttcccaccttgacaccaggcaatgtagttagcatattttatgtacca

SEQ ID NO: 8527 - DNA, 542 bp, Homo sapiens
ccactgcactgaaaaaattgaaaagtcttggtttaattcatgctgatctcaagccagagaatattatgttggtggatcctgttcggcagccttacagggttaaagtaatagactttgggtcggccagtcatgtatcaaagactgtttgttcaacatatctacaatctcggtactacagagctccagagattatattggggttgccattttgtgaagccatagacatgtggtcattgggatgtgtgattgcagaattatttcttggatggccgctctacccaggagccttggagtatgatcagattcgatacatttctcagactcaaggtttgccaggagaacagttgttaaatgtgggtactaaatccacaagatttttttgcaaagaaacagatatgtctcattctggttggagattaaagacattggaagagcatgaggcagagacaggaatgaagtctaaagaagccagaaaatacattttcaacagtctggatgatgtagcgcatgtgaacacagtgatggatttggaaggaagtgat

SEQ ID NO: 8528 - DNA, 505 bp, Homo sapiens
  unsure (8): n=A,T,C or G
  unsure (19): n=A,T,C or G
  unsure (35): n=A,T,C or G
  unsure (67): n=A,T,C or G
  unsure (179): n=A,T,C or G
  unsure (229): n=A,T,C or G
  unsure (338): n=A,T,C or G
  unsure (380): n=A,T,C or G
  unsure (397): n=A,T,C or G
  unsure (404): n=A,T,C or G
  unsure (417): n=A,T,C or G
  unsure (439): n=A,T,C or G
  unsure (498): n=A,T,C or G
ttctaatngtataaaaatnggaaatttgaaatagntctgtaaaagaaaaaaatgtaaaaatacatcngctttctctcatggtttaatacagcattggaaggctttcagatgttttcttaaaaaaaaacaaaacccaaaaaaactcaacatttaaaaccaaatctcagcttcatttccanaaatattgcagtttggtttaggtaatgtttcatttaatctactccagttnccacaaaatggcattttattaaaaaaacctttcagttatttggtccttttgcaatttgctgtgcacataatgcctactgtaccaaacttttattgcctttaaatttagntgtaattttattgataaaatttaaatctagtgtctttatttnttctgttacaatagtgntgcttgngtaagcaggttanagtgcacagtgtccccaattgntcctggcactgcaaaaccaaattaaacaattccacaaagaattctgacatcaatgtgtntttcctc

SEQ ID NO: 8529 - DNA, 402 bp, Homo sapiens
  unsure (135): n=A,T,C or G
  unsure (142): n=A,T,C or G
  unsure (198): n=A,T,C or G
  unsure (351): n=A,T,C or G
  unsure (381): n=A,T,C or G
tacttctagagttatatagtcccagagatgtttatgactatttacgtcccattgctctgaatctgtgtgcagacaaagtttcttctgttcgttggatttcctacaagttggtcagcgagatggtgaagaagctgnacgcggnaacaccaccaacgttcggagtggacctcatcaatgagcttgtggagaactttggcngatgtcccaagtggtctggtcggcaagcctttgtctttgtctgccagactgtcattgaggatgactgccttcccatggaccagtttgctgtgcatctcatgccgcatctgctaaccttagcaaatgacagggttcctaacgtgcgagtgctgnttgcaaagacattaagacaaactctactanaaaaagactgtttcttggcct

SEQ ID NO: 8530 - DNA, 591 bp, Homo sapiens
ccaaaaaaatcaagatttaatttttttatttgtactgaaaaactaatcataactgttaattctcagccatctttgaagcttgaaagaagagtctttggtattttgtaaacgttagcagactttcctgccagtgtcagaaaatcctatttatgaatcctgtcggtattccttggtatctgaaaaaaataccaaatagtaccatacatgagttatttctaagtttgaaaagtaaaaagaaattgcatcacactaattacaaaatacaagttctggaaaaaatatttttcttcattttaaaacttttttaactaataatggctttgaaagaagaggcttaatttgggggtggtaactaaaatcaaaagaaatgattgacttgagggtctctgtttggtaagaatacatcattagcttaaataagcagcagaaggttagttttaattatgtagcttctgttaatattaagtgttttttgtctgttttacctcaatttgaacagataagtttgcctgcatgctggacatgcctcagaaccatgaatagcccgtactagatcttgggaacatggatcttagagtcactttggaataa

SEQ ID NO: 8531 - DNA, 555 bp, Homo sapiens
  unsure (11): n=A,T,C or G
  unsure (49): n=A,T,C or G
  unsure (311): n=A,T,C or G
  unsure (437): n=A,T,C or G
  unsure (502): n=A,T,C or G
  unsure (514): n=A,T,C or G
gctcacctgcnccaccccaggagaaactgcagacctatcagccagaggntgttaaggcaaatcaagcggaaagtatgtcttcttaagctaccatttacatgttttcatatttgcatttatcatttgcttctaattatctgtctagaccatagtaagaattaacttgttttgtttgttttagggtaatcttacatgagccttctttagaaacagcaatcgattcttttttattttttaatgatacagaaaattgtttatattaattttgtttgcttacttctgcatttatattttgttccactagtcctcanacttcttcagtgaataattttttttttctccaaaattaagataagttctttgtttggagctatgtaccacatcctttcaggtgttcttctgaattatatttaatctttgataatgagtgaaaagcncagacattcctggagtaagacatctatgtgttctctcctagatgatcctaccagacaatatgaangaccattacatnactatcgaccacagcaggaatcaccatctccccaacaacag

SEQ ID NO: 8532 - DNA, 595 bp, Homo sapiens; identical to SEQ ID NO: 8184

SEQ ID NO: 8533 - DNA, 591 bp, Homo sapiens
  unsure (18): n=A,T,C or G
  unsure (19): n=A,T,C or G
  unsure (553): n=A,T,C or G
ctgacacaggcaaacagnngcacaagtggaatagaatacaatgcctgattctcacttgttgtctccaaccaagccaacatggagcacatgatgaagtcccactcactctctgccaaaggggatgagcagtatttcagaaatagggaaagaaaccggattatttctatatttacacccagtacctctggacttgcttctgatagattacaactgaaaagaaaaatatcttcatgctctttcttccaggatattatgatttttaatattccatgtaatagctctccatcatctatacttttggtttgcagacaagaattgaaaatggcaagatgtccaaaacctccattagtgctgcaaagatctttcttagtccagcccaaaagagcaggtatacattgagcactaaattctttcttttcttcttttgacaaaaatggacatagactttgaatggtatgcaaattgccttcagttagtggaaaaaaactttcttttctcttataatgtggttttacttcatcagatgaaatgcttcgggaaaggatcaacttancaataataagagaccacagtgtgccatgttctctggac

SEQ ID NO: 8534 - DNA, 485 bp, Homo sapiens
  unsure (8): n=A,T,C or G
  unsure (11): n=A,T,C or G
  unsure (65): n=A,T,C or G
  unsure (308): n=A,T,C or G
  unsure (463): n=A,T,C or G
  unsure (475): n=A,T,C or G
ggaatccncanttcaaggttatcctacgcagagagccaggtaccaatgggtgcgctgcaatccanacagtaattctgcaaactgccttgaagaaaaaggaccaatgttcgaactacttccaggtgaatccaacaagatcccccgtctgaggactgacctttttccaaagacgagaatccaggacttgaatcgtatcttcccactttctgaggactactctggatcaggcttcggctccggctccggctctggatcaggatctgggagtggcttcctaacggaaatggaacaggattaccaactagtanacgaaagtgatgctttccatgacaaccttaggtctcttgacaggaatctgccctcagacagccaggacttgggtcaacatggattagaagaggattttatgttataaaagaggattttcccaccttgacaccaggcaatgtagttagcatatttnatgtaccatggntatatgatta

SEQ ID NO: 8535 - DNA, 361 bp, Homo sapiens
cctgtggaaaagggaagtggacaacatttatattacaagacagtaattttattgaaacatctttttttgtctaaaactatgcatggagatattaatctcttgtttataaattaggttaagtctaacatcactatttgaaaccagtgttatttacaaaaatgaacctcttctttgctttattgttggtttacaggaataattttaaaccaacctcaatctatctttaaaaatcttcctgccttcaaatgcccagcaacccttataaggtagggggcagccctttgacagcaacattcatcattcaccaggaatgtagaaccacaagtgaacaacaacaacaacaacaacaagattaaatcat

SEQ ID NO: 8536 - DNA, 582 bp, Homo sapiens
ctgttggtcagtatgccaataacatcacactttggatctttgcagtcactgcaggcatgttcctctatgtagccttggtggatatgcttccagaaatgttgcatggtgatggtgacaatgaagaacatggcttttgtcctgtggggcaattcatccttcagaatttaggattgctctttggatttgccattatgctggtgattgccctctatgaagataaaattgtgtttgacatccagttttgacctttcccagtaatcactgttgattacgagaatgttaccatgcagctttgcatctgttccttgtactgtatgcacattgctcaaaggaaagtcagtggcttgcactacttacaagtttcatagatttgagcctaaccacaagaggctggtgcttagtactgttttccctgcacgtaggggtcttttaaaaatataaagcttgtgataaagagaggagaatatgggactccatgaaccagtgttgatatgtttgattaagacttttcacaaaataatcatataaaacactagtctctttattagtagaaacttctgtggctatgcagaaatagagatc

SEQ ID NO: 8537 - DNA, 310 bp, Homo sapiens
  unsure (9): n=A,T,C or G
  unsure (10): n=A,T,C or G
  unsure (136): n=A,T,C or G
  unsure (262): n=A,T,C or G
  unsure (285): n=A,T,C or G
caagctttnnttttttttttttttttttttttttaggagccaaaatagttatttattaataatttaaggttttacattcttataataaatttcagctctaaactttacaccacgaacataatggagaatttaactntcccttcttcacaatcaaatgcatttctcttatcaaatgggtacccatgctcacacacacacacttccagttttatacaaatttttttaaaggaaagaaaccaacccaaagtattgcatttgaggngacactccctgaaaaattttatncagaggtaatatactgtttagcaca

SEQ ID NO: 8538 - DNA, 602 bp, Homo sapiens
  unsure (540): n=A,T,C or G
cctcttgaaacctaggcttggaactggcatacagtcacttcttccacattctattgatcaaatcaagtcacagtgccagcccagattcaaatggtggggaaagagacttcatttatggaagggaggagctgcaaatttcattgccaagaggtgtggatacccagaaagatacatttgacaaaccatctatcaaagttactgtcagaggtatgtttttggaaatatcatttggagtgggatgtgtcctgtatgactggaatcgttttctatttgtaacagagaagcgtgcccactccttgcacccatagataacccaatgccgaaggatatgagagagagagatgtccagtttgtgcctctcccagcttcttgtccagagactccttggtttagattttgatacactacttagaaaaggtggagagtttctttaagatttcatccacagagggccgcacagagggatcatgggcccggcactcatcaatgatctcccgcagctctgaagggcagtcttcacccagtggctcctgctgccgnttcacagccaccagcttgcggatcttctcagaattacagccttgaaacgggatatctccagt

SEQ ID NO: 8539 - DNA, 575 bp, Homo sapiens
  unsure (562): n=A,T,C or G
ctggtgggagggatgaaggaaattatctggacgatgctctcgtgagacaggatgcccaggacctgtatgaggctggagagaagaaatgggggacagatgaggtgaaatttctaactgttctctgttcccggaaccgaaatcacctgttgcatgtgtttgatgaatacaaaaggatatcacagaaggatattgaacagagtattaaatctgaaacatctggtagctttgaagatgctctgctggctatagtaaagtgcatgaggaacaaatctgcatattttgctgaaaagctctataaatcgatgaagggcttgggcaccgatgataacaccctcatcagagtgatggtttctcgagcagaaattgacatgttggatatccgggcacacttcaagagactctatggaaagtctctgtactcgttcatcaagggtgacacatctggagactacaggaaagtactgcttgttctctgtggaggagatgattaaaataaaaatcccagaaggacaggaggattctcaacactttgaatttttttaacttcatttttctacactgntattatcattatc

SEQ ID NO: 8540 - DNA, 468 bp, Homo sapiens
ccttgttccactgtgccttggtttctcctttatttctaagtggaaaaagtattagccaccatcttacctcacagtgatgttgtgaggacatgtggaagcactttaagttttttcatcataacataaattattttcaagtgtaacttattaacctatttattatttatgtatttatttaagcatcaaatatttgtgcaagaatttggaaaaatagaagatgaatcattgattgaatagttataaagatgttatagtaaatttattttattttagatattaaatgatgttttattagataaatttcaatcagggtttttagattaaacaaacaaacaattgggtacccagttaaattttcatttcagataaacaacaaataattttttagtataagtacattattgtttatctgaaattttaattgaactaacaatcctagtttgatactcccagtcttgtcattgccag

SEQ ID NO: 8541 - DNA, 638 bp, Homo sapiens
  unsure (10): n=A,T,C or G
  unsure (517): n=A,T,C or G
  unsure (536): n=A,T,C or G
  unsure (551): n=A,T,C or G
  unsure (599): n=A,T,C or G
ccaacatggngaaaccccatgtttactaaaaatacaaaaattagccaggcatggtggtgcatgcctgtaatcccagctactggggatctgaggcaggaggatcgcttgaacccaggaggcagaggttgcagtgagctgagatcatgccactgaactccagcctgggcaacagagagactccgtctcaaaaaaaaaaaaaaaaaaattcatcaaggtatatacatatacattcagattagtgtacatgtaaaatatgatatacaacagagcctttcatgaataggataatttgcatattcatatggaaaacatatgcagtatcttaagccatagttttccaaaatttcaaattaaatacttatagctttgacatattcctgttacttcaactttccagggatgctctagaagaaacgggagacatgttgtaagactttaatgacattccacaaactaaatttattgtgggaattaacatcagaaattaagggaaaaaatactctaatttgatcactanctgctacaagactccctanaaagtggaccatgtntatttttttcacaattctgtttgctaagtggaaaagctgcttcttggnagactcaaacatgacacatactgaaatggcaagcaatga

SEQ ID NO: 8542 - DNA, 533 bp, Homo sapiens
  unsure (487): n=A,T,C or G
  unsure (494): n=A,T,C or G
  unsure (522): n=A,T,C or G
  unsure (523): n=A,T,C or G
cctgaaaagtggttctggaaaagtgtaccaaggccctgcaaaaggtgctgctgatacaacaatcatactttcagatgaagatttcatggaggtggtcctgggcaagcttgaccctcagaaggcattctttagtggcaggctgaaggccagagggaacatcatgctgagccagaaacttcagatgattcttaaagactacgccaagctctgaagggcacactacactattaataaaaatggaatcattaaatactctcttcacccaaatatgcttgattattctgcaaaagtgattagaactaagatgcaggggaaattgcttaacattttcagatatcagataactgcagattttcattttctactaatttttcatgtatcattatttttacaaggaactatatataagctagcacataattatccttctgttcttagatctgtatcttcataataaaaaaattttgcccaagtcctgtttccttanaatttgngatagcattgataagttgaaaggaaaannaaatcaataa

SEQ ID NO: 8543 - DNA, 591 bp, Homo sapiens
  unsure (9): n=A,T,C or G
  unsure (10): n=A,T,C or G
  unsure (564): n=A,T,C or G
ctcctatgnnataagaggaaagtttatcctctatactattcagatgtaaggaatgatatattgcttaattttaaacaatcaagactttactggtgaggttaagttaaattattactgatacatttttccaggtaaccaggaaagagctagtatgaggaaatgaagtaatagatgtgagatccagaccgaaagtcacttaattcagcttgcgaatgtgctttctaaattataaagcacttgtaaatgaaaaatttgatgctttctgtatgaataaaactttctgtaagctaggtattgtctctacaaaattctcattgtatagttaaaccacagtgagaagggttctataagtagttatacaaaccaagggtttaaatacctgttaaatagatcaattttgattgcctactatgtgaactcactgttaaaggcactgaaaatttatcatatttcatttagccacagccaaaaataaggcaatacctatgttagcattttgtgaactctaaggcaccatataaatgtaactgttgattttctcacttggtgctgggtactaggttnataaaattgtatgatagttattatatt

SEQ ID NO: 8544 - DNA, 518 bp, Homo sapiens
ccagctgtgaaactgatgaaaaagtttcttccgaataatctacattaacttgagagatattgaggtatgtttcttgattatcttctcccacaaatggcgatgtgtgagttaacaacatatatgctattataccaatattccacatatctgttgctgtggtaatgggatcatagttcaggatttctggagctaaatattctggtgttcccataatttcccgaagttcacacgcatgccctatttttcgagacattccaaaatctactattttaatgtccccgagagggtatatgctgctcagtaatatattctgtggctttaaatcaaggtgtacaatgttattctgatgtagataataaactccttcaagtatttgtttaatgagtctgataacatcattttcagaaaccatttcagccaactcaggtaaacacaggctgaaaatttctccacctgcagcactaaaataaaattcaaagaacagagacttgaaaattcattcacttaaacacttttaa

SEQ ID NO: 8545 - DNA, 597 bp, Homo sapiens
ctgactatatctcagggtagcttccttgtttctactcagaagctagttgggccacaactgtcacgacattctgcagagattcccaacctgggattccagaagatctctggacaggtcccttcagtaggcaagcgtctgagtagacagcaggctgatgaagagctgctaataattggtgggcttgctgtgccagtacacttgcggagtacctgttggtttgtcctgctgatgccccccaaccatgctaaataggtctgaggcacacattacatttggttgaatgagcccgttaatatcctaccacagatgaatacaatgaggtgacaggaaaacctaggaaccatgacttatgaagactggctgttaaagtagcatttatgaaaatggggtaagcacaaggctgataaaactaaaggatctggaagctcatggctagacttagtctgcagagaaaacccacccagttctacacaaagccatctccccacttttcaaaaataggtttttcacactagaattctggaaatgacttcatttggctttcctggcctgtatggatatgggtttacataacattggttacaatatatttattcc

SEQ ID NO: 8546 - DNA, 583 bp, Homo sapiens
  unsure (452): n=A,T,C or G
  unsure (454): n=A,T,C or G
  unsure (582): n=A,T,C or G
ctgggcgcatgaaagcagagttctttgcagatgtagttccagcagtcagaaagtggagagaggccggaatgaaggtgtacatctattcctcagggagtgtggaggcacagaaactgttattcgggcattctacggagggagatattcttgagcttgttgatggtcactttgataccaagattggacacaaagtagagagtgaaagttaccgaaagattgcagacagcattgggtgctcaaccaacaacattttgtttctgacagatgttactcgagaggccagtgctgctgaggaagcagatgtgcacgtagctgtggtggtgagaccaggcaacgcaggattaacagatgatgagaagacttactacagcctcatcacatccttcagtgaactatacccgccttcctcaacctagagaagggttgttaaggcagaccgccctgttccccananttgtccctgtagtgtctaggtttattctaatggtaaaagtaacttacttaaaaaacatatgtacacatatgtatgcaagtatgtatatatgtgtatgctcagattaacttccataggtacataagtgna

SEQ ID NO: 8547 - DNA, 612 bp, Homo sapiens
  unsure (485): n=A,T,C or G
catgtggagctgggacgtggagtgcgatacgtgcgccatctgcagggtccaggtgatggatgcctgtcttagatgtcaagctgaaaacaaacaagaggactgtgttgtggtctggggagaatgtaatcattccttccacaactgctgcatgtccctgtgggtgaaacagaacaatcgctgccctctctgccagcaggactgggtggtccaaagaatcggcaaatgagagtggttagaaggcttcttagcgcagttgttcagagccctggtggatcttgtaatccagtgccctacaaaggctagaacactacaggggatgaattcttcaaataggagccgatggatctgtggtcctttgggactcatcaaagccttggtttagcattttgtcagttttatcttcagaaattctctgcgattaagaagataatttattaaaggtggtccttcctacctctgtggtgtgtgtcgcgcacacagcttanaagtgctataaaaaaggaaagagctccaaattgaatcacctttataatttacccatttctatacaacaggcagtggaagcagtttcagagaactttttgcatgcttatggttgatcagttaaaaaag

SEQ ID NO: 8548 - DNA, 492 bp, Homo sapiens
cctcgtgaggcgaggcggcaaaatttgatttcttggaggacacctgagcatatacggtcaaagtctgatgacaacaccagtagggatgaagctgggagtggggtggctaagaacactggacctgacactattagacatgggttccagcttcaggtctattactgctcactgtggccgagcaacagagctacttaggtaaaatggtgatggtcataacactagcccacagggaggttacgaacctctggtgacaatgtaagtgaaaggcccctgagaaagagtgagggagttgcaaatgtcagtagccatcaagatcttctttaagaatagtttccactaaagagatgattgctttggtttccagccttctttgttttgtctccccgctgggccttctacctttaaagggctttggctctgggggaattgagttggctggggcttgatgacttccaagaggacacaagtggagatctactgcctgctcttggc

SEQ ID NO: 8549 - DNA, 524 bp, Homo sapiens
  unsure (16): n=A,T,C or G
cctatactcttaatgnactttattaaagtcccacatgagcaccgtgcaataattagagtttccccaataagtttacccaactatcaacctttattagtacttatggcttatggtgtggtttaatgtcttttttatttttcgaaaacaaatggcacttaagtgcacttcaaaaactgttaggtgatataagtaagctagaaaagtaagatcatcatgggctcttttctaacaaacgtgttgatgaaatgataagcaaaatgatgttacccctatgatatctagtaagacaccatggagcatcctagttttatccaagtactgcccaactaatgcaatttatgtcctgaatgtgcattagaatatcctgagtttcagtggcctgttaactggtaaacagtgccacagaaaacacaacactgggtagaggaaagtgggtagaggaaaatcccctgagcttaaatgatcttagatgaggtcttgttttgattttctattttatatatatttcatgttaaaatatctgg

SEQ ID NO: 8550 - DNA, 646 bp, Homo sapiens
  unsure (642): n=A,T,C or G
cctcctcgaccaaggcagggaacttcaatctgtataagtatctgcagttgctggaataatttgaagaccccatggagctaaggagattaagtggaggattttcattgtttcagaggggcaaggggcaaatccattgctaattctttaatgatgaaaaatggtaagaagttgttaaactcctttggggattttaaaaagtgatacgtaaacagaagagagagagagagagagaaatcacagtagtgaggctaacaaaaataatgataaaaaggttagaagaacccaggatacttagtggatgcctagacaacataaaaatagatttatagaaggaagcaatggaatttgaatataaaagggtatcagaaagttaatgtgttgcatctgaaattcaaagtatttccttttggctacacaagaaagacttttaataaaaccctttgtatatatttctgaaaggtaaatattttatagggaaatggaggattggaagaaaatctgttccatcatgtctgggtattagaattttgcttaataacttgccaaaatattacgcttccaagggctatggcattatgtgtgtacccaattaaagcaatttttctttgctttgtctcctaacttaaattcaaatgacatatnaacc

SEQ ID NO: 8551 - DNA, 394 bp, Homo sapiens
  unsure (8): n=A,T,C or G
  unsure (10): n=A,T,C or G
ctgaggtngncagtacaatgaaaccaaactggcgggatggaagcagattattctgccatttttccaggtctttgagttgcacgtcaaatctggggctgatcaccccacacttgtttagcctgcctgtgaggttcacaacaattttcccagctctgtggtcatcaatgatttcaaattcgccaatgtaaccatgcttcatcatcacagtgagaaaccggacgatgactttggagcacggcctaataagcacctggcgtttgcctctcttttcggcattgttgatactcttgagagcatctgccaggacattcatgcgcaccattgtggcttagattgcaggatggcgccgatggcagacggatgaaattggagctctcagagagtgctactcgcc

SEQ ID NO: 8552 - DNA, 507 bp, Homo sapiens
  unsure (10): n=A,T,C or G
ctggtatttngcctaagatctatttaagataaccttttcttatattttttacttaatattgggcataatcgtatcattcaagattaagtctgggttatttctttgataagaactgaatgtggccgggcgcagtggctcacgcctgtaatcccagcactttgggaggccgaggtgggtggatcacaaggtcaggagatcgagaccatcctggctaacacggtgaaaccctgtctctactaaaaatacaaaaattagccgggtgtggtggtgtgcacctatagtcccagaactcaggaggctgaggtgggaggatcacctgagcccaggaggtcaaagctgcagtaagctgtgattgcgccactgcactccagcctgggtaaagagtgaggccctatcttaaaaaaaaaaaagggtgggcgtgatggctcacacctgtaatcctagcactttgggaggccaaggtgggtggcttacttgaggtcaggagttcaagaccacccttggacc

SEQ ID NO: 8553 - DNA, 597 bp, Homo sapiens
  unsure (11): n=A,T,C or G
  unsure (180): n=A,T,C or G
  unsure (522): n=A,T,C or G
  unsure (565): n=A,T,C or G
cctcataaaangcaaaacaaaaattaggtattttgtcctaaaacacctggtaggagtgtgtgatttttttgcattcctgacaaaggagagcacacccaggtttggaggtcctaggtcattagccctcgtctcccgttccctttgtgcacatcttccctctccccattcggtgtggtgcantgtgaaaagtccttgattgttcgggtgtgcaatgtctgagtgaacctgtataagtggaggcactttagggctgtaaaatgcatgattttgtaacccagattttgctgtatatttgtgatagcactttctacaatgtgaactttattaaatacaaaacttccaggctaaacatccaatattttctttaatgcttttatatttttttaaaatgttaaaacccctatagccaccttttgggaatgttttaaattctccagttttttgttatatagggatcaaccagctaagaaaagattttaatcaagttgaattgaggggattaatatgaaaacttatgacctnttcctttaggagggagttatctaaaagaaatgtctattaaggngatatatttaaaaatatttttgggtgttcctg

SEQ ID NO: 8554 - DNA, 170 bp, Homo sapiens
atgtagctgatatattactataacctcacttgcatttttaaattattttactggttctctctttttacttttatcttacctatgctgtatttgaagttagttttatatagacagaattttaaaaattatttatttatggggtacaaatgcaatttggacaatattgttgg

SEQ ID NO: 8555 - DNA, 337 bp, Homo sapiens
  unsure (243): n=A,T,C or G
accacatagatagcttgacaaggagtgctgtctgtccttaccacattttcagcactcagcacagtgccttgtgtataataggcactcaatttattataaatcttcagtatgtcctgagaacagctttagtcatggaatactgggagaaggaataactttcacaaaataaacttaaaacagcctgtaattattgaggttcatattcttctggtatatcattctgagaaattgtggctaatttanaacattgtttagaattgacaaaaggccctggcaattaaattgtcaaggcccaagggctaattttaattttctttttacttggagtcattcaaag

SEQ ID NO: 8556 - DNA, 285 bp, Homo sapiens
  unsure (10): n=A,T,C or G
cctatttganagaggaaatgtatgatgaagctattcaggattatgaaactgctcaggaacacaatgaaaatgatcagcagattcgagaaggtctagagaaagcacaaagattattgaaacagtcgcagaaacgagattattataaaatcttgggagtaaaaagaaatgccaaaaagcaagaaattattaaagcataccgaaaattagcactgcagtggcacccagataacttccagaatgaagaagaaaagaaaaaagctgagaaaaagttcattgatatagcag

SEQ ID NO: 8557 - DNA, 562 bp, Homo sapiens
  unsure (35): n=A,T,C or G
  unsure (67): n=A,T,C or G
  unsure (439): n=A,T,C or G
  unsure (491): n=A,T,C or G
  unsure (514): n=A,T,C or G
  unsure (516): n=A,T,C or G
tgaataaactaggtattgatgcaacatatctcaanataataagagctatttttgacaaacccaccgncaatatcatactgaataggcaaaagctggaagcattccctttgaaaaccagcacaagacaaggatgctgtctctcaccactcctactaaacatagtataggaagttctggacagggcaatcaggcaagaaaaagaaataaagggtattcaaataggaagagagaagtcaaattgtctctgtttgcagatgacatgactgtatatttagaaaaccccatcatttcagcccaaaatctccttaagctgagaagcaacttcagcaaagtctcaggatacaaaataaatgtgcaaaaatcacaagcattcctatgcaccaataacagagagccaaatcatgagtgaactcccattcacaattgctactaagagagnaaaatacctaggaatacaacttacaagggatatgaaggacctcttgaagtanaactacaaacaactgctcaaggnanttaagagaggacacaaacaaatgaaaaagcattccatgctcatgga

SEQ ID NO: 8558 - DNA, 491 bp, Homo sapiens
ccaagaactcaaagaggcagcattggaaccatcgatggaaaaaatatttaaaattgatcagatgggaagatggtttgttgctggaggggctgctgttggtcttggagcattgtgctactatggcttgggactgtctaatgagattggagctattgaaaaggctgtaatttggcctcagtatgtcaaggatagaattcattccacctatatgtacttagcagggagtattggtttaacagctttgtctgccatagcaatcagcagaacgcctgttctcatgaacttcatgatgagaggctcttgggtgacaattggtgtgacctttgcagccatggttggagctggaatgctggtacgatcaataccatatgaccagagcccaggcccaaagcatcttgcttggttgctacattctggtgtgatgggtgcagtggtggctcctctgacaatattagggggtcctcttctcatcagagctgcatggtacacag

SEQ ID NO: 8559 - DNA, 177 bp, Homo sapiens
  unsure (10): n=A,T,C or G
  unsure (41): n=A,T,C or G
  unsure (43): n=A,T,C or G
  unsure (99): n=A,T,C or G
  unsure (108): n=A,T,C or G
  unsure (115): n=A,T,C or G
  unsure (116): n=A,T,C or G
  unsure (131): n=A,T,C or G
  unsure (133): n=A,T,C or G
  unsure (134): n=A,T,C or G
  unsure (160): n=A,T,C or G
gagtggcttnctaacggaaatggaacaggattaccaactantngacgaaagtgatgctttccatgacaaccttaggtctcttgacaggaatctgccctnagacagccnggacttnngtcaacatggattanannaggattttatgttataaaagaggatnttcccaccttgacacca

SEQ ID NO: 8560 - DNA, 512 bp, Homo sapiens
  unsure (345): n=A,T,C or G
ctggcctcattgagctgctttctaatattaacgtgtaatgatgaatccattttatcaggacagtaggctacaaattgctctttggaaaataagtcaaacttaattctcatgaaaacaacctatctctctctccatatatatacatacatacatacatacatacatacatacatacatataaacatattccaaagatcttaaggtctatgatcaggttttatcatcacaggaaatttggaaaaaagtaaaaccaacttcagactctttttaacttatggctgtgttatctaatggctctccttaactgtcattaagagataaaatagctccagtgttacagacatncccgggcggccgctcgactcttttttctctccttccgggggaccaaggtaccttctggggcatacaacatggcagcagggcctcgggaagaggggtaggaggaccgagcagcattctctgtagaggaagacaggaaaggagaccctcttggcacacatttatggagg

SEQ ID NO: 8561 - DNA, 516 bp, Homo sapiens
  unsure (390): n=A,T,C or G
tattctaaattttgtagctcctgaccttacatccttttcttccttatgtctttcagatccaggtgaacttgagagaattagagacagccactgggctccccccggggttgaaacgggtttcccagaccaggggttcagaggagactatttatccttcatgatctttggcgattctccactggagcggaagggctgtgtgtcaaaagaaggaagccaggctgtgaagggccgtgttgctttcagtgggtgggcagaggtttagaaaggtggttctgaaatggcacctggtactcttgtgggacctggggaatataaggaactctgtgcatgaggtttcaaaaataaaaattgagtccactctccccgtacacacacactcgggcacttcangaggtcagttctcaccccttcctcgatggggctttaaagctctggggagaagagctgctccccactcatgccccagagggactgtgaaaaggcttcctgtgacctccgatggcggcccctcattgg

SEQ ID NO: 8562 - DNA, 481 bp, Homo sapiens
  unsure (10): n=A,T,C or G
  unsure (11): n=A,T,C or G
  unsure (174): n=A,T,C or G
  unsure (227): n=A,T,C or G
  unsure (277): n=A,T,C or G
  unsure (370): n=A,T,C or G
  unsure (405): n=A,T,C or G
  unsure (418): n=A,T,C or G
  unsure (438): n=A,T,C or G
  unsure (476): n=A,T,C or G
  unsure (477): n=A,T,C or G
ctattttcanngttctcacaacaaaaagataaatatgtgacataagagatgtgttaagcagcttgatttaatcattccacaatataaatatatacgaagacataatactgtacccctcaaaacaattattatttatttaaaacatttaaaaacaaaaaatgagacaaatatcangaaagtaattttatacataagctagataattgcctatagctgcgtatgctgtnaaataatttctgtttgaaaagacgggaaaaattatatggcaaaaccatantgcagtaataaatttgccatgtttagtaaacaaaatatagttcaatgtgactgaagcataccaagaggcaggagaatgtggtgtacactgtantgtagaggagtgtcttagtttgggctgctatacanaataccatagatngagtggcttacaaataacanaaaaagtatttcttactgttctaggggttggaagtccnnagtc

SEQ ID NO: 8563 - DNA, 195 bp, Homo sapiens
  unsure (35): n=A,T,C or G
  unsure (74): n=A,T,C or G
  unsure (84): n=A,T,C or G
  unsure (92): n=A,T,C or G
  unsure (96): n=A,T,C or G
  unsure (108): n=A,T,C or G
  unsure (109): n=A,T,C or G
  unsure (118): n=A,T,C or G
  unsure (137): n=A,T,C or G
  unsure (187): n=A,T,C or G
tccctgcaaatgggacttacgagtttggttatcanatgcactttatttgtaatgagggttattacttaattggngaagaaattntatattgngaanttaaaggatcannagcaatttngagcggtaagcccccaatntgtgaaaaggttttgtgtacaccacctccaaaaataaaaaatggaaaacncaccttta

SEQ ID NO: 8564 - DNA, 195 bp, Homo sapiens
ccatagcttcatccttgcctttcatgcccactaaaaacttaacaagtctagcaggatgttggaatccatctcgaagttcttgtgggtcctcagcaagagcacatgacttatgatataaatcttccatactagggctagccatcagcattacctttgcactgtataagtggtcagcatctggtggatcaagaatgg

SEQ ID NO: 8565 - DNA, 572 bp, Homo sapiens
  unsure (506): n=A,T,C or G
  unsure (509): n=A,T,C or G
  unsure (517): n=A,T,C or G
  unsure (559): n=A,T,C or G
ggttcagtatctgcctcttttaggtcagagtatgctatgagtagcaatacatacatatatttttaaaagttgatacttctttatgacccacagttgacctttattttcttaaataccagggcagttgtggctcattgtgcattttactgttggcccattcatttcgtttttggaaattatggttttgtattttcatgtttatttacattcatttttgtttattcagggaaagctgatctttttttcaaaccagaaaaaaaaatgaactagatatgaagtagagttcattaaatatcttgctattgtcagagtttttaaaatatagacttaattttgtttttttaaattggaatacaataaagtactacctacatttgagtcagtcaccactcttattgtgcaggttaagtacaagttaactaaaaataaactgtcctctctggtgcaactcacaaccaagatcaagattaccttaaaatttatttgaattttttagatgttttggntgncaaactgnaaggaaacttcacaacatttaagtcttactctgtatgtaacnatccatcattcac

SEQ ID NO: 8566 - DNA, 598 bp, Homo sapiens
ctggcagatgcagaagaagcgatgtatcagaatgtggatggccgtgtttcggaatgtcctcacacctaccaaaacaggcgacctttcagcagagagatggatttggggctactctctccgcaggctcaggtcgaagattcgtagaggaacaatttagttttaaggacttcatccctccacctatccctaacaggctgtagattaccaaaacaagattaatttcatcactaaaagaaaatctattatcaactgctgcttcaccagacttttctctagaagctgtctgcgtttactcttgttttcaaagggacttttgtaaaatcaaatcatcctgtcacaaggcaggaggagctgataatgaactttattggagcattgatctgcatccaaggccttctcaggctggcttgagtgaattgtgtacctgaagtacagtatattcttgtaaatacataaaacaaaagcattttgctaaggagaagctaatatgattttttaagtctatgttttaaaataatatgtaaatttttcagctatttagtgatatattttatgggtgggaataaaatttctactacaaaaaaaaaaaaaaaaaaaa

SEQ ID NO: 8567 - DNA, 595 bp, Homo sapiens
  unsure (590): n=A,T,C or G
ccaggctggtctcgaaatcccgacctcgtgatccacccacctcagcctcccaaagtgctgggattacaggtgtgagcaacctcgcccagccccaagtttattaaaaagcactactgcaatacccaacaaattaaagggtaggtactttgaggaagtagagcctgccccctttaaaagcaggacaagctacactttcagaatagggaaaaaatgtatctgagggatttattaacacttagcaagggcaggatttaaatagtttgagcagcaaaagagtttttccagaagttttatttacttttatttaattgcagtctaaacatgtgtcttacagtgagcgttttcatataaataatttacagaaaaaggttatttacaaagccacagatctcattcagttaggtaatatggttttctagttattatgggaaaggttaacacttgattgggtctatacagtgccttaaaattgccctcaccacatgaagctctgtccagatgacaaagagaatgtatacctcttcataagtgactatatatactcctgaatccataatcactctcagacctgtgtgaagcttggttaaggngagat

SEQ ID NO: 8568 - DNA, 417 bp, Homo sapiens
  unsure (8): n=A,T,C or G
  unsure (13): n=A,T,C or G
  unsure (17): n=A,T,C or G
  unsure (30): n=A,T,C or G
  unsure (33): n=A,T,C or G
  unsure (45): n=A,T,C or G
  unsure (46): n=A,T,C or G
  unsure (58): n=A,T,C or G
  unsure (69): n=A,T,C or G
  unsure (72): n=A,T,C or G
  unsure (74): n=A,T,C or G
  unsure (99): n=A,T,C or G
  unsure (108): n=A,T,C or G
  unsure (142): n=A,T,C or G
  unsure (145): n=A,T,C or G
  unsure (155): n=A,T,C or G
  unsure (199): n=A,T,C or G
  unsure (214): n=A,T,C or G
  unsure (225): n=A,T,C or G
  unsure (226): n=A,T,C or G
  unsure (230): n=A,T,C or G
  unsure (236): n=A,T,C or G
  unsure (249): n=A,T,C or G
  unsure (311): n=A,T,C or G
  unsure (312): n=A,T,C or G
  unsure (381): n=A,T,C or G
  unsure (385): n=A,T,C or G
  unsure (394): n=A,T,C or G
  unsure (396): n=A,T,C or G
agctagantaagntggncatgatgcagaanctnctcaaatgcagnnggcttgtcctgnctcttgccctnatncnggttctggaatcctcagttcaaggntatcctacncagagagccaggtaccaatgggtgcgctgcaatncanacagtaattntgcaaactgccttgaagaaaaaggaccaatgttcgaactacttncaggtgaatccaacnagatcccccgnntgangactgncctttttccaaanacgagaatccaggacttgaatcgtatcttcccactttctgaggactactctggatcaggctnnggctccggctccggctctggatcaggatctgggagtggcttcctaacggaaatggaacaggattaccanctantagacgaangngatgctttccatgacaacctt

SEQ ID NO: 8569 - DNA, 559 bp, Homo sapiens
  unsure (519): n=A,T,C or G
cctggctcttgccctcatcctggttctggaatcctcagttcaaggttatcctacgcagagagccaggtaccaatgggtgcgctgcaatccagacagtaattctgcaaactgccttgaagaaaaaggaccaatgttcgaactacttccaggtgaatccaacaagatcccccgtctgaggactgacctttttccaaagacgagaatccaggacttgaatcgtatcttcccactttctgaggactactctggatcaggcttcggctccggctccggctctggatcaggatctgggagtggcttcctaacggaaatggaacaggattaccaactagtagacgaaagtgatgctttccatgacaaccttaggtctcttgacaggaatctgccctcagacagccaggacttgggtcaacatggattagaagaggattttatgttataaaagaggattttcccaccttgacaccaggcaatgtagttagcatattttatgtaccatggttatatgattaatcttgngacaaagaattttatagaaatttttaaacatctgaaaaag

SEQ ID NO: 8570 - DNA, 594 bp, Homo sapiens
  unsure (63): n=A,T,C or G
  unsure (190): n=A,T,C or G
  unsure (245): n=A,T,C or G
  unsure (277): n=A,T,C or G
  unsure (299): n=A,T,C or G
  unsure (312): n=A,T,C or G
  unsure (324): n=A,T,C or G
  unsure (344): n=A,T,C or G
  unsure (364): n=A,T,C or G
  unsure (366): n=A,T,C or G
tttttttttttttttttttaagaggtgagttctccctttgtgatcacgttgaagtgcagtggngggaccatagttcactatagcctccaaactcgggctccagcgattctcctgcctcaggcttctgagtagctaggactacgggtatgcaccaccatgcccagctaattttttaaaaatgttttcgtanagatgagggtctcactaaggctgcctaggctggtctcaaactcctggcctcaagnggtcctcccactttgaactcctaaagtgttgngattattggtgtaagccactgngcccagcctatanaaatgttttgcncgaatttctggaaccatcanaaaacaccagagtctgccananaagtccccaaatagcacaggaataaatggcataaaatattaataattcatgtctcagcaagggaataggcagagaacacatgttcagcaccagcagtgccaggagctgttattttgacctaacttgctccaaatgaaagtccagacacaatctctcacacaaaattcttcaccggctcaaccataacaagaatagtccctaatagcatttattaagtgctattatgtg

SEQ ID NO: 8571 - DNA, 252 bp, Homo sapiens
  unsure (10): n=A,T,C or G
  unsure (21): n=A,T,C or G
  unsure (44): n=A,T,C or G
  unsure (46): n=A,T,C or G
  unsure (49): n=A,T,C or G
  unsure (94): n=A,T,C or G
  unsure (182): n=A,T,C or G
  unsure (195): n=A,T,C or G
  unsure (196): n=A,T,C or G
  unsure (221): n=A,T,C or G
aaataaaatnaaaaaaggtcnaatgggaagctgaaaaataaatnanagntgactcttttaaaacaataataaattaaacaagcaaaaatcgacncaaattaaaattggaaattacaaaggaaagaaacaacaatcaataaacagttattaaacaaaaaaggttttaaaaaattatgatgaantactatgcacagnngtttggcaatatactatatgtaaangtgtatttaaataaattggcattctccacac

SEQ ID NO: 8572 - DNA, 142 bp, Homo sapiens
ctggggaaagaaagaggaggaagtggaaaaagagtaggaggagggtggttctctccagggcacccttcctgctttgggatggtgactcacccagcaggccctgggagaggcaatttatcagccccaacgaagacaggccagg

SEQ ID NO: 8573 - DNA, 532 bp, Homo sapiens
  unsure (20): n=A,T,C or G
  unsure (35): n=A,T,C or G
  unsure (49): n=A,T,C or G
  unsure (59): n=A,T,C or G
  unsure (62): n=A,T,C or G
  unsure (69): n=A,T,C or G
  unsure (73): n=A,T,C or G
  unsure (116): n=A,T,C or G
  unsure (139): n=A,T,C or G
  unsure (142): n=A,T,C or G
  unsure (264): n=A,T,C or G
  unsure (338): n=A,T,C or G
  unsure (403): n=A,T,C or G
gaggtctggtatagattcanttactaatgcagtanctaagaaaaaatgngacttttcantancttcacngganagttgtgtaagattccaagccatttgcatctggatctggagtngacatgttaactaaagaagtgtnttnctccttcatttctttatcatcactgtaagttttctttgttgttagtacagaataatctgtggttttgagttcagtttcagtaaatgtctgtgaatcaaagattgtttgttctgttgcagganagttttgaggggattcaaatgacttttcttcttgaatttgttcctctgatgttgtttcactttcaatttcttgncttacagggttgacttcttgcctagaccataatttggctggctctatagtttggggaaagtttgntgaaactgtgccactgacctttacttcctccttctctactggagctttcgtaccttccacttctgctgttggtaaaatggtggatcttctatcaatttcattgacagtacccacttctcccaatccttc

SEQ ID NO: 8574 - DNA, 592 bp, Homo sapiens
ggcaacccaaggaaaggaaatcacctcggtcggcagtgtgactgctgagactgccggggctgctgcctgctgcttctcgcgcctgtcctctccaagatgcagttttttgatgctgaggagctcctggtcgatgaagaggatgatgtttttggtgaaggtaaatgcatctttctggcaggaggctctccggtctgctttgctttgttttgacaccactggacacttttgcccagcttgggcaaggacttgagtattttgaaatgataaaaacaaagcatcctgagtgaggtagtggctgcaaatatcaacttaggcactgaaggaatacacaaggcaaggggtggaacaaggggttgagtcattcccgcaaatacattttttaaagtcatgactaaaataaaggtttagtttaggctggaaaatagtactaaattttttgccttgtctctcttctgtgctatctcttgtctaacaccttaaggaaagcctgtcacagtggtttgagcacagcagggctgctagggaagaagttaaataaatggaccaggagtggtttttcatggtaccatgttgctttgatttgcacttctct

SEQ ID NO: 8575 - DNA, 337 bp, Homo sapiens
ccaggaaaaagaaagaaaaacaaaacaaaacagaaaaggtcgatcttgccttgaaagcgggcagtggctattttcttctctctgccaaagcaggacacgttattcttaacacagagggccacatcgctgtccctcacaaatacttcagacagttgtcttcaacatcctgtggttcttcgtccgattccttttttttttttgagatggagtctcgctctgtcccccaggctggagcacagtggtgccatcttgacttactgcaacctccacctcccgggttgaagggattctcctgtctcagtccccccaaatacctgggattacaggcgcccgccac

SEQ ID NO: 8576 - DNA, 255 bp, Homo sapiens
  unsure (7): n=A,T,C or G
  unsure (48): n=A,T,C or G
  unsure (87): n=A,T,C or G
  unsure (91): n=A,T,C or G
  unsure (128): n=A,T,C or G
  unsure (131): n=A,T,C or G
  unsure (168): n=A,T,C or G
  unsure (170): n=A,T,C or G
  unsure (210): n=A,T,C or G
  unsure (233): n=A,T,C or G
  unsure (242): n=A,T,C or G
tttgtantcttccaagttcagagatctccttggagccccatccttggntggcggagccttggaggtgatggctaaagcctttgactntganctgggaacttgtaagtcaatcttcacatcaaaatcgngtnctttgaacagatcttctaagaggtcactggctgactnanaattcaaatctttatctttgccttgacccttgctcatttnctttggagcatctggtaacactncagaaccgnattttgcattcag

SEQ ID NO: 8577 - DNA, 428 bp, Homo sapiens
ccaaggaatggcattgtgcagaggcataccgggaagctctctggatgcaaccccacctctaccgcttggcagtcaatgaccttggcatgatgtttcttcacttctctgaggctaggtctttgattctgaacatggggactgtaatgcctgcctgacctgtgttagaacagcatgtgtcactgagtggaggtgggaggaatttgtaaactgtgaagtgctagccacacaggtgggaaaggtaagcctatcctgtagagctctgctgccctgacaatgcctgggatttggccttcttttctggagcacactaaggcaatcttggctagtgcatcagacgggagtgagccccagtgactgagtaaatggagaataagacaaggaacacgagcatccggcctgtgcagacatacaagcagaataaaccacag

SEQ ID NO: 8578 - DNA, 551 bp, Homo sapiens
ccagcatttgacagtggaatgtcttcccaggatgtacacattttccccaataatcttgaacacttcccatttacctctagagcatctttcttgtcctgattaaggaggtatccttctcttgctctctctcagttgaggttattttgtaggaaaaaatgattgtagccagggcttgaaagtggcagggaataagtttgagtgtcccctatctttcctcatgacagtgctggagcattagcacaaagcctgtctatcatcatgggaaataatcccacccaaacacactgggaagacgtgagggtgtctccttggtcttattagcctagcagaaggacagaaagatgaagggatgtggggttgcggggaatgagaagcgctgaacacctggaatttgttcccttgggccgacaggttgcagcttgcttgctgttctccctctgtctgagaacacttcgtatttaacactctctaattctgcttgcacatcctctacttccttccttcttttcacctctcaaggtttgtgcccaaatatggctctatttcagctc

SEQ ID NO: 8579 - DNA, 473 bp, Homo sapiens
  unsure (22): n=A,T,C or G
  unsure (246): n=A,T,C or G
  unsure (254): n=A,T,C or G
  unsure (255): n=A,T,C or G
  unsure (258): n=A,T,C or G
  unsure (281): n=A,T,C or G
  unsure (301): n=A,T,C or G
  unsure (302): n=A,T,C or G
  unsure (415): n=A,T,C or G
ggtcttgaactcctgacctcangtgatctgtctgtcttggccttctagagtgctgggattacagggttgagccaccgcacccagccgggatataaatatatttaatcttcacaccaactcatgatgtaggttctattataaattccattttatagatgatgaaactgaggcacagcgaggttaggttatttgcctaaaatcgtcacagtaagagacagagcaaggatttgaacccaaacaatctgnctccaganncancgtccttaaccactgttctctcntgcttttttgtaagtacatnnacataattttcaggagaaaggttgtgctagactttgtagaaaaatcttttctcatcctaatgtgagaaatatctgccatggttcaatgtatgtgagtgtgttatatctttcangagtgttggggtgggaaaaaagtttgagaagtactatcctaaagagtattttgtctta

SEQ ID NO: 8580 - DNA, 265 bp, Homo sapiens
ccattttcttttttcaccttaaaggtcaaacatgaaacaatgaggaatgtaggtctttgtaaaacacataaatacctgtgatgttttgaatcatttggcccttaaaaatattgcttaacaagttaaacccagcttaattgtaggtaaatgcaagtatacccaaggctggactattttagtctgcttttggctgcagattgtacttctgtggctggaaaaaatgttcttcaatagcactgaccagttcattcagttccttcttcag

SEQ ID NO: 8581 - DNA, 369 bp, Homo sapiens
  unsure (9): n=A,T,C or G
  unsure (19): n=A,T,C or G
  unsure (68): n=A,T,C or G
  unsure (172): n=A,T,C or G
ggttattcnagtgaccganaccgcggccgggaccgagggtttggtgcacctcgatttggaggaagtanggcagggcccttatctggaaagaagtttggaaaccctggggagaaattagttaaaaagaagtggaatcttgatgagctgcctaaatttgagaagaatttttatnaagagcaccctgatttggctaggcgcacagcacaagaggtggaaacatacagaagaagcaaggaaattacagttagaggtcacaactgcccgaagccagttctaaatttttatgaagccaatttccctgcaaatgtcatggatgttattgcaagacagaatttcactgaacccactgctattcaagctcagggatgg

SEQ ID NO: 8582 - DNA, 588 bp, Homo sapiens
  unsure (574): n=A,T,C or G
ctgagacgggaactgaattcttccccaggaagaaaatacctatacccacaataggtctgcaaaatctcccacaggcacctcttctccctttcttgtggttgtttgttaattggtttgttttgcctaaaagcaagatggcaatcttaatcaaaaagggaagctagatttttaaaataacttaaaaaaaccatttttatataaagcagcaaaaacatatcttcctctctgcagaaagaaaaatgttaacaaggaaacacagcgatgtgaacggactgtccgtcaactcctgctccactggatcccccatccagcttcacctcgagctactccttaactccagcagtgctgtctgaagaagatcctttggcgtcttcaactgctcttttactttcttgattgagactttcattttcggacctggtcccattagggatagagttttcaccgtttacaagcccgttttctgtggcctttgctttgctgattgcctctctgatgttcaaggcatcctgcactccagcctcctcctcgaggtttctcaagaccagggggagcctcgagtcccccacgctgntctccaacagccca

SEQ ID NO: 8583 - DNA, 518 bp, Homo sapiens
  unsure (510): n=A,T,C or G
cttggccatcctgctctttgtatatgaacagaagctgaatgagtatgtggctaagggtctgaccgacagcatccaccgttaccactcagacaatagcaccaaggcagcgtgggactccatccagtcatttctgcagtgttgtggtataaatggcacgagtgattggaccagtggcccaccagcatcttgcccctcagatcgaaaagtggagggttgctatgcgaaagcaagactgtggtttcattccaatttcctgtatatcggaatcatcaccatctgtgtatgtgtgattgaggtgttggggatgtcctttgcactgaccctgaactgccagattgacaaaaccagccagaccatagggctatgatctgcagtagtcctgtggtgaagagacttgtttcatctccggaaatgcaaaaccatttatagcatgaagccctacatgatcactgcaggatgatcctcctcccatcctttccctttttaggtccctgtcttatacaaccaganaagtgggt

SEQ ID NO: 8584 - DNA, 276 bp, Homo sapiens
  unsure (6): n=A,T,C or G
  unsure (246): n=A,T,C or G
  unsure (250): n=A,T,C or G
cattgncagttcttgtctagttttcattaaaagaacaaagatcttttatatggatatcttataaatatataatcattgctaagtaagaagttaagttgttgctatcgcaacaatcctggcagacaattgagtaatattttgatgacttattttgtttgtaattagttattataagaagatctagatcctagatattagaataaaatttattttctactgtatccatttcaaatgttaaaatattgnttantatttttgaaatccctgagtatcagg

SEQ ID NO: 8585 - DNA, 389 bp, Homo sapiens
  unsure (239): n=A,T,C or G
ccaggaaaaagaaagaaaaacaaaacaaaacagaaaaggtcgatcttgccttgaaagcgggcagtggctattttcttctctctgccaaagcaggacacgttattcttaacacagagggccacatcgctgtccctcacaaatacttcagacagttgtcttcaacatcctgtggttcttcgtccgattcctttttttttttgagatggagtctcgctctgtcccccaggctggagcacagnggtgccatcttgacttactgcaacctccacctcccgggttgaagggattctcctgtctcagtccccccaaatacctgggattacaggcgcccgccaccacgcccggctaatttttgtatttttaatagagacatgctttcaccatgttgg

SEQ ID NO: 8586 - DNA, 223 bp, Homo sapiens
ctgtttgaccgaacaggtgatggcaagatcctgtacagccagtgtggggatgtgatgagggccctgggccagaaccctaccaacgccgaggtgctcaaggtcctggggaaccccaagagtgatgagatgaatgtgaaggtgctggactttgagcactttctgcccatgctgcagacagtggctggggctctcagccgcccaaggggaggacaacagaggtcag

SEQ ID NO: 8587 - DNA, 451 bp, Homo sapiens
  unsure (16): n=A,T,C or G
  unsure (28): n=A,T,C or G
  unsure (48): n=A,T,C or G
  unsure (50): n=A,T,C or G
  unsure (68): n=A,T,C or G
  unsure (72): n=A,T,C or G
  unsure (79): n=A,T,C or G
  unsure (100): n=A,T,C or G
  unsure (154): n=A,T,C or G
  unsure (157): n=A,T,C or G
  unsure (163): n=A,T,C or G
  unsure (170): n=A,T,C or G
  unsure (174): n=A,T,C or G
  unsure (186): n=A,T,C or G
  unsure (194): n=A,T,C or G
  unsure (196): n=A,T,C or G
  unsure (204): n=A,T,C or G
  unsure (232): n=A,T,C or G
  unsure (246): n=A,T,C or G
  unsure (262): n=A,T,C or G
  unsure (308): n=A,T,C or G
  unsure (329): n=A,T,C or G
  unsure (362): n=A,T,C or G
  unsure (366): n=A,T,C or G
  unsure (399): n=A,T,C or G
  unsure (429): n=A,T,C or G
tggattggatatggtnggagtggcacanactggatctgggaaaacatngncttatttgcttcctgccnttgnccacatnaatcatcagccattcctaganagaggcgatgggcctatttgtttggtgctggcaccaactcgggaactggcccancangtgcancaagtanctgntgaatattgtanagcatgtngnttgaagtntacttgtatctacggtggtgctcctaanggaccacaaatacntgatttggagagaggngtggaaatctgtattgcaacacctggaagactgattgactttttanagtgtggaaaaaccaatctgngaagaacaacctaccttgtccttgatgaagcanatanaatgcttgatatgggctttgaaccccaaataangaagattgtggatcaaataagacctgatangcaaactctaatgtggagtgcg

SEQ ID NO: 8588 - DNA, 588 bp, Homo sapiens
  unsure (484): n=A,T,C or G
  unsure (535): n=A,T,C or G
  unsure (554): n=A,T,C or G
  unsure (561): n=A,T,C or G
caaattttcctgaagaaaagtaggaaattattatttataagtataattaaagagagatctttaatttcttttttttttttttttgagacggagtctcgctctgtcgcccaggcgcaatctcagctcactgcaacctccacctcccgggttcatgccataaagaaaggtttcttatttggattcagctaatactcatggaatgcattttctttaacacctttttatcataaaatacaatcttttactttggctgtgcaattgatacctttatttttccttaaaatattgtaatagcatagatatatggtatatacttcctgcttgctgtgctgtcttataagaaatccagaaacatagaaacattatggcatttcccagttagtgtttaacaaagtctattagcagatcctagtgattataggataaataacaaacttaattatcagggttaatttaggattatcaaccatatgtttttcattgngaattatcagttggtctatagatggaaaatataagatgtataatgtattancttaaaaaatgctcttcanagagtgnctagaattatagaatttaaaaattttg

SEQ ID NO: 8589 - DNA, 433 bp, Homo sapiens
  unsure (348): n=A,T,C or G
  unsure (398): n=A,T,C or G
  unsure (399): n=A,T,C or G
  unsure (400): n=A,T,C or G
cctcaaccaagagggttgatggcctccagtcaagaaactgtggctcatgccagcagagctctctcctcctccagcaggcgccatgcaagggcaggctaaaagacctccagtgcatcaacatccatctagcagagagaaaaggggcactgaagcagctatgtctgccaggggctaggggctcccttgcagacagcaatgctacaataaaggacacagaaatgggggaggtgggggagccctatttttataacaaagtcaaacagatctgtgcgttcattcccccagacacacaagtagaaaaaaaccaatgctgtggtttctgccaagatggaatattcctcctcctanttccacacatggcgtttgcaatgctcgacagcattgcactgggctgctgnnntctgtgttctggcaccagtagcttgggccccat

SEQ ID NO: 8590 - DNA, 319 bp, Homo sapiens
cctgtgaagtacagtcagaagtacagatggatgaaagaagaaactggcaaagaactgagtggaaggccctgtgaactgggggactcgtggtggaaagctaggccacctcaccctacattcgaccttgaaagacgcagtgtttggcctgctgccctgaagcccacacgtttaccagtggtgcagtgccagcagcatcttgtgagcccctctgaagccaaatgctggcttccctgggggaacaaagtaaagctcctgtttgacaagcttcagacagaggcagtgtctgtgctgccagggagagcccaggctcaggagatgg

SEQ ID NO: 8591 - DNA, 208 bp, Homo sapiens
ctgcagcggctgtgtgtgctgctggatgtttacctggagaccgagagccatgacgacagtgtggaggggcccaaggaatttccccaggagaagatgtgtctgcggctcttcaggggtcctagcaggatgaagccatttaaatacaaccatcctcagggattcttcagccatcgctgatctcccgcgcagaccgttgtttcccccaagg

SEQ ID NO: 8592 - DNA, 597 bp, Homo sapiens
cctcagttgtcacttccacaaaagaggataataaagtactaccatacaaggtcacagtgaggatgaagggcagttcttaacatggcagccaacacacagtaagtgctccctttaagctattcattccaattcttatccagaaagataaccagtaaggactagaaatgtggtcatataaattatgtacagagctgttttcccctcatacttaacccctgcccttgaactcagcaatgagcgagccctcaggggctgtctctgcggggctgcacatgaactgcttgcgtgtataacttgtataacctcccaacgtgcctctcacaatgcatgaggcaggagctctggaactatcagctcccaactcctcaagcccaaagtgaagaaaattcaaaacagtacatatgactgtcaatggtcttcattcatttatatccatattaaaattagtttgcatttcttttacatgtatcttttgatggatgtcagaagaaaattattcagagatttaaaagtgacacagataagccactaaatagataacagataacatagatgagaaatgaaacaactatatgtatattctgaggagttagttaa

SEQ ID NO: 8593 - DNA, 332 bp, Homo sapiens
  unsure (5): n=A,T,C or G
  unsure (6): n=A,T,C or G
  unsure (19): n=A,T,C or G
  unsure (28): n=A,T,C or G
  unsure (36): n=A,T,C or G
  unsure (48): n=A,T,C or G
  unsure (76): n=A,T,C or G
  unsure (96): n=A,T,C or G
  unsure (106): n=A,T,C or G
  unsure (134): n=A,T,C or G
  unsure (174): n=A,T,C or G
  unsure (238): n=A,T,C or G
  unsure (270): n=A,T,C or G
  unsure (287): n=A,T,C or G
  unsure (293): n=A,T,C or G
  unsure (307): n=A,T,C or G
  unsure (313): n=A,T,C or G
  unsure (316): n=A,T,C or G
  unsure (320): n=A,T,C or G
cttgnnttggtaatctacngcctgttanggataggnggagggatgaantccttaaaactaaattgttcctctacgnatcttcgacctgagcctgcngagagagtanccccaaatccatctctctgctgaaaggncgcctgttttggtaggtgtgaggacattccgaaacacggncatccacattctgatacatatttaatcttatgttgatttcaccatgtggctgctcctgcttcanaacttctgcagtgtcccaggacttcttgctgnctttgtgttacccttgnccttgnttttcccaggcatnctctgnggngggntttccctctgcg

SEQ ID NO: 8594 - DNA, 358 bp, Homo sapiens
ggttccctgcccacagaccttccaggagaatgacctgagcaccttctttcccttcatctttgaagaagaacctatcttcttcgacacatgggataacgaggcttatgtgcacgatgcacctgtacgatcactgaactgcacgctccgggactcacagcaaaaaagcttggtgatgtctggtccatatgaactgaaagctctccacctccagggacaggatatggagcaacaagtggtgttctccatgtcctttgtacaaggagaagaaagtaatgacaaaatacctgtggccttgggcctcaaggaaaagaatctgtacctgtcctgcgtgttgaaagatgataagcccactctacag

SEQ ID NO: 8595 - DNA, 583 bp, Homo sapiens
ctgcagttccaggtcctgaagttccattcggactgaatttctcaaaccctggagctgatcaacttcaaacctctcctcctcagtcatatgatgataaaccatggtttgctgacgcagcattgccaattctaaatccatcatttgtgttctaaacaaattcaggctccgcctcattacctggagctcctgaaaagtattttcataaagaggtagaacagatgatttctgagtactatatggagcagcagcaggatcaggtcctctcatcatagggtacttcaaaaaagtaaaagtaggattaaaaccaatgttaaagtgaatacttccaaatcacttaaggggttaaaaggcagaatttggggcctatatatttttctctttaagacaaaaggatccaaaaaaccttcatattgtaagcaggaaaaaagaaatcagttcccaatgactcgagcggccgcccgggcaggtccatggacaagctgaggaagatgctggttccctgcccacagaccttccaggagaatgacctgagcaccttctttcccttcatctttgaagaagaacctatcttctttgacacatg

SEQ ID NO: 8596 - DNA, 418 bp, Homo sapiens
ctgaaaggagagagctgactgtcctggctgatggacaggagatcctcttagcactaccctaaggcaggcagttgggcattggtgtagacaacaggaaagtccaggctatagccgtactcaaaaacctttctgttccctttctgccagccctagggattgagtccacattcagcacaggactctctgggtacagctctctttaggaagacacaaattgcatggtgaagtcagttatatcctggccgcctttggtccctcccaggaagacgggcatgttttctgcttgagaggtgctgatgtaccagttggggaactgggcagactcaaattccagcttgttattgatttctatcttgttgaagacaaatcgcttttccatcttcttctttgggtaatttttgggatctacactctccag

SEQ ID NO: 8597 - DNA, 272 bp, Homo sapiens
cctgctggttgatcccaaatccacgtagaacggttccaactgcagcggggaagatgggctggtttaaaataaaaaaccaggtattgtttcactggtgccagaacacccagctcttcctggtattatggggtctgcagaccaggtggaccccgggaataggcaggggctatagtcgcattttcagaaggtgatctggagccatggaaaatgccctactctctggcagttctaccagccaccctcagaccacagcttccctgaaggctgtgcag

SEQ ID NO: 8598 - DNA, 252 bp, Homo sapiens
ctggcttcccacttcttggtacccggttaactgccaggtgggtgacagtgatgccaggctcgcccactactgcactggacacaacctcaccaatgccaccttcataataatggtcctccacggtgaggatcctgcccttggtggcacgagcgctgtcgagaatgagttttctgtccaggggcttgatggtgaaggggtccagcacgcggatgttgatcttttctttcttcagcagttcggcagcggccaagg

SEQ ID NO: 8599 - DNA, 287 bp, Homo sapiens
ctggtattttgcctaagatctatttaagataaccttttcttatattttttacttaatattgggcataatcgtatcattcaagattaagtctgggttatttctttgataagaactgaatgtggccgggcgcagtggctcacgcctgtaatcccagcactttgggaggccgaggtgggtggatcacaaggtcaggagatcgagaccatcctggctaacacggtgaaaccctgtctctactaaaaatacaaaaaatattagctgggtgtggtggcgggtgcctgtagtcc

SEQ ID NO: 8600 - DNA, 270 bp, Homo sapiens
  unsure (151): n=A,T,C or G
  unsure (153): n=A,T,C or G
  unsure (155): n=A,T,C or G
  unsure (183): n=A,T,C or G
  unsure (205): n=A,T,C or G
  unsure (254): n=A,T,C or G
ctgcgggggctgcacgctctggagctccgtgaagttgttctcggcgaagctctcgaactcgctgtgcacgtggtgggggtggaagtcccagtaatggtcgctatggctctccccatcactgctgagataggggtaatactcgtgcgtttgncntnggtatagatccgtgtcatagggcaccangtcttctgatggaggggggacnaggggaaacccttccattttgcacgcctgtaacatccagccgggctccnagtcggtcagatcccc

SEQ ID NO: 8601 - DNA, 327 bp, Homo sapiens
ctgagttgctttaccttatcccacctggctcttacgcagtctgttccaagtgagaagttagcagagtcctgtaaacaaagaacagttcaggggccaacctgcgctcccaggtgccaggatgctctcagggtcttcactgtgctcccaggtgccagggtgctcccatggtcttcactgtgctcccagacacttggcttcattgttctcattttgatcctcatttggcatctctaaacgcaggcggtgcagggaatgcacaaagaagcgaggaagtttgcagaccaagttgagttcctccttcccggaccccagggcaggcaggatcag

SEQ ID NO: 8602 - DNA, 549 bp, Homo sapiens
ccgcgcgctgcacaatggcggctctgaagagttggccgtcgcgcagcgtaacttcattcttcaggtacagacagtgtttgtgtgttcctgttgtggctaactttaagaagcggtgtttctcagaattgataagaccatggcataaaactgtgacgattggctttggagtaaccctgtgtgcggttcctattgcacagaaatcagagcctcattcccttagtagtgaagcattgatgaggagagcagtgtctttggtaacagatagcacctctacctttctctctcagaccacatatgcgttgattgaagctattactgaatatactaaggctgtttataccttaacttctctttaccgacaatatacaagtttacttgggaaaatgaattcagaggaggaagatgaagtgtggcaggtgatcataggagccagagctgagatgacttcaaaacaccaagagtacttgaagctggaaaccacttggatgactgcagttggtctttcagagatggtagcagaagctgcatatcaaactggcgcagatcagg

SEQ ID NO: 8603 - DNA, 201 bp, Homo sapiens
ggatgccgccatccagagggcagaggtccaggtcctggaaggagcacttcatctgtttagggccatcagcttcaaagaacaagtcatcctcattgccactgtaataagccatcatttcactggcgagctcaggtacttctgccatggctgcttcagacacttgagcaatgaagattggctgaagagaatcccagagcagcc

SEQ ID NO: 8604 - DNA, 556 bp, Homo sapiens
  unsure (523): n=A,T,C or G
  unsure (533): n=A,T,C or G
  unsure (540): n=A,T,C or G
ccaccatccttgggaccgcctgcctggccttacctccttcttgcccattcagatgcactggtaccgggccacccaccaggaagccatcaactgctatgccaatgagacctgctgtgacttcttcacgaaccaagcctatgccattgcctcttccatcgtgtccttctacgttcccctggtgatcatggtcttcgtctactccagggtctttcaggaggccaaaaggcagctccagaagattgacaaatctgagggccgcttccatgtccagaaccttagccaggtggagcaggatgggcggacggggcatggactccgcagatcttccaagttctgcttgaaggagcacaaagccctcaagacgttaggcatcatcatgggcactttcaccctctgctggctgcccttcttcatcgttaacattgtgcatgtgatccaggataacctcatccgtaaggaagtttacatcctcctaaattggataggctatgtcaattctggtttcaatccccttatctactgncggagcccanatttcanaattgccttccaggag

SEQ ID NO: 8605 - DNA, 587 bp, Homo sapiens
ctgtgttggtagtaagtgttttgggtataaggtataaaacagaaattagatcagaaaagtgcagggggaagaccactgccaaagagtaatctccaagaacttggtattttccaccgtgaggcagatactgtggggtcatcgctaagtggtttgagtatctgaagccactcattaagatactcaacaagacctaatgcatctgggatgttgtccccttctgaaacaaatttcagcagaactgccatttggatttctttagaacagctttcatcatagagtgtttttgtgatacctcctcccggaatgcggatacaaaactcggaatcatctatttcaggaatgcaccggcttttttccatttcttcccagttaaggctctttattttattttgaacacttttttgcatggaaggtgtaagtaggtaccggaagggagtactacgaagctgcagatcattacgctgatatgaatgactgcttgaaagaacaatgactctggcacagccactgcttttcacccaggaaagcagtttttcacagaatggctttgatttatacttaataaaaatggatcttaactgtagagc

SEQ ID NO: 8606 - DNA, 499 bp, Homo sapiens
  unsure (185): n=A,T,C or G
  unsure (206): n=A,T,C or G
  unsure (213): n=A,T,C or G
  unsure (231): n=A,T,C or G
  unsure (458): n=A,T,C or G
  unsure (492): n=A,T,C or G
ccttttggggataaaacagtttctcttaagtggtgaaaaagctacattttgttctttcagtctaatcttgttttctgctatgattttcttgcgctgttccagataaggtccaaaacttggcagtttcttgtccatgagttcagctatacgtggaactggtttccctttctggtgactcacagtanctggactctgtccatcccagncttgtanttcttcaatgcttttcanataaagcagggctttgaggccagtgcagtagtcttcgatcacagtgaaatcctgattctgaatggcactgcatacctggaggacggaagcaccactatggagaaactgaagaccactttcagcagagtcaattccaccagtagccaaaatgggaaatccaggcagagcacgagcaatggaggtcacagctctcaaagcaataggtctgattgctgtcccagacactnctccatatgtagttcgctttgcaatccccactgntggccaa

SEQ ID NO: 8607 - DNA, 550 bp, Homo sapiens
  unsure (525): n=A,T,C or G
  unsure (533): n=A,T,C or G
ccatatcatgtaccaaaagttgctgaagtttctcttctagctggtaaagtaggagtttgcatgacttcacactttttttgcgtagtttcttctgttgtatgatggcgtgagtgtgtgtcttgggtaccgctgtgtactactgtgtgcctagattccatgcactctcgttgtgtttgaagtaaatattggagaccggagggtaacaggttggcctgttgattacagctagtaatcgctgtgtcttgttccgccccctccctgacaccccagcttcccaggatgtggaaagcctggatctcagctccttgccccatatcccttctgtaatttgtacctaaagagtgtgattatcctaattcaagagtcactaaaactcatcacattatcattgcatatcagcaaagggtaaagtcctagcaccaattgcttcacataccagcatgttccatttccaatttagaattagccacataataaaatcttagaatcttccttgagaaagagctgcctgagatgtagttttgntatatggntccccaccgaccatttt

SEQ ID NO: 8608 - DNA, 93 bp, Homo sapiens
ccaatctgtcaggagcagaagtgacagggcatttaaacaccactaagagatcctctgattctccttgcccatcagctcagcacctcagaccag

SEQ ID NO: 8609 - DNA, 222 bp, Homo sapiens
  unsure (6): n=A,T,C or G
  unsure (7): n=A,T,C or G
  unsure (16): n=A,T,C or G
  unsure (58): n=A,T,C or G
  unsure (61): n=A,T,C or G
  unsure (69): n=A,T,C or G
  unsure (86): n=A,T,C or G
  unsure (90): n=A,T,C or G
  unsure (102): n=A,T,C or G
  unsure (114): n=A,T,C or G
  unsure (120): n=A,T,C or G
  unsure (123): n=A,T,C or G
  unsure (147): n=A,T,C or G
  unsure (178): n=A,T,C or G
  unsure (199): n=A,T,C or G
  unsure (211): n=A,T,C or G
  unsure (213): n=A,T,C or G
gaaaanntgggaggtnaactttcctctgaagataaggagaccatggaaaaagctgtanaanaaaagatngaatggctggaaagccnccangatgctgacatngaagacttcaangctaanaanaaggaactggaagaaattgttcanccaattatcagcaaactctatggaagtgcangccctcccccaactggtgaanaggatacagcananaaagatgag

SEQ ID NO: 8610 - DNA, 592 bp, Homo sapiens
  unsure (554): n=A,T,C or G
  unsure (565): n=A,T,C or G
  unsure (569): n=A,T,C or G
ctgaagacaagggtacagggaacaaaaataagatcacaatcaccaatgaccagaatcgcctgacacctgaagaaatcgaaaggatggttaatgatgctgagaagtttgctgaggaagacaaaaagctcaaggagcgcattgatactagaaatgagttggaaagctatgcctattctctaaagaatcagattggagataaagaaaagctgggaggtaaactttcctctgaagataaggagaccatggaaaaagctgtagaagaaaagattgaatggctggaaagccaccaagatgctgacattgaagacttcaaagctaagaagaaggaactggaagaaattgttcaaccaattatcagcaaactctatggaagtgcaggccctcccccaactggtgaagaggatacagcagaaaaagatgagttgtagacactgatctgctagtgctgtaatattgtaaatactggactcaggaacttttgttaggaaaaaattgaaagaacttaagtctcgaatgtaattggaatcttcacctcagagtggagttgaaactgntatagcctaancggnttgtttactgcttttcattagca

SEQ ID NO: 8611 - DNA, 499 bp, Homo sapiens
  unsure (477): n=A,T,C or G
ccttttggggataaaacagtttctcttaagtggtgaaaaagctacattttgttctttcagtctaatcttgttttctgctatgattttcttgcgctgttccagataaggtccaaaacttggcagtttcttgtccatgagttcagctatacgtggaactggtttccctttctggtgactcacagtagctggactctgtccatcccagtcttgtagttcttcaatgcttttcagataaagcagggctttgaggccagtgcagtagtcttcgatcacagtgaaatcctgattctgaatggcactgcatacctggaggacggaagcaccactatggagaaactgaagaccactttcagcagagtcaattccaccagtagccaaaatgggaaatccaggcagagcacgagcaatggaggtcacagctctcaaagcaataggtctgattgctgtcccagacactcctccatatgtagttcgctntgcaatccccactgctggccaa

SEQ ID NO: 8612 - DNA, 590 bp, Homo sapiens
  unsure (552): n=A,T,C or G
  unsure (573): n=A,T,C or G
ctgaaaaagagtgatcctcaatatcctaactaactggtcctcaactcaagcagagtttcttcactctggcactgtgatcatgaaacttagtagaggggattgtgtgtattttatacaaatttaatacaatgtcttacattgataaaattcttaaagagcaaaactgcattttatttctgcatccacattccaatcatattagaactaagatatttatctatgaagatataaatggtgcagagagactttcatctgtggattgcgttgtttcttagggttcctagcactgatgcctgcacaagcatgtgatatgtgaaataaaatggattcttctatagctaaatgagttccctctggggagagttctggtactgcaatcacaatgccagatggtgtttatgggctatttgtgtaagtaagtggtaagatgctatgaagtaagtgtgtttgttttcatcttatggaaactcttgatgcatgtgcttttgtatggaataaattttggtgcaatatgatgtcattcaactttgcattgaattgaattttggttgnatttatatgtattatacctgncacgcttctagttgctt

SEQ ID NO: 8613 - DNA, 591 bp, Homo sapiens
  unsure (492): n=A,T,C or G
ctgacacaggctgcaaacaaatgtcctctcatcctcaccgcaatccctacaagctgctcacctcctgttgccatgtggatgtgtcctgagtggcccacgcagatttctacacttgatcccctcgcttgaaataaaaggagataaagtgagtacaaacacccttatgtattactgtagctcaaacgaggccagactagatcctaaagaagacctggcgtgggccatcttctagagtcatcccacctcccaggacaagcaaaggtcctgcctccaagtcattgcaacttatatgacacagcaaggcaatatagactctgggggaaaaagttttttaactacagtatttttaaaatagaacattattttgaaattacttcgacatctactgtcaggtgacttgtaaaagcgcttgtatgttaaatgctctacattaggagattattttgttcttgagtccctacagagaattccttgggaatgaagtgctattgngcattcagaattatgtggctatagccatattgcaggccgggaactcaggaatgtcccctctgtcccagctcttcaagttgggccctacagatcccacgg

SEQ ID NO: 8614 - DNA, 394 bp, Homo sapiens
cctactatgggtgttaaattttttactctctctacaaggttttttcctagtgtccaaagagctgttcctctttggactaacagttaaatttaccctggctcaacaaaagggctggggattggccctgaaaggagagagctgactgtcctggctgatggacaggagattctcttagcactaccctaaggcaggcagttgggcattggtgtagacaacaggaaagtccaggctatagccgtactcaaaaacctttctgttccctttctgccagccctagggattgagtccacattcagcacaggactctctgggtacagctctctttaggaagacacaaattgcatggtgaagtcagttatatcctggccgcctttggtccctcccaggaagacgg

SEQ ID NO: 8615 - DNA, 558 bp, Homo sapiens
  unsure (513): n=A,T,C or G
ccaagggctaagagagaagagattgcatttaagataccctttggagtctggaaagcacctggatttcttgggagaggagcctggatttcttgggagaggagggctgtggaagccccaatcagttcttcttcgttttgggagtgtcatatttcctcttgctggagtaccacaatagcagggggatgccgatggagggaagggtcatgaccccaaaggctgcccagtccagaaaatgaggggagaatcgcctgtcaaactcccgctgagccaggattcctccctgtccaggtgcactggtagagccaatcacaacgggcccatcctcctgggccaggtaagtaattgttgccgaggtgaagttgaaataaccagccttgagagggcgcaggaccacagtgtgggagacattgctagcaggggcaatccggtcccatttgacattgagcattccagacacaatgccaaagtcttctggagggaaggaatcatcagatagttccacgtctaatgcancacttgagccaacattgtagatgttgtactgcaaggtcaggtctc

SEQ ID NO: 8616 - DNA, 420 bp, Homo sapiens
  unsure (307): n=A,T,C or G
  unsure (394): n=A,T,C or G
ctgttcttctttttgttcctgacatttcagctcttcttctaaatgtctgtcttcttgaaggctggaaattaccttcttctcatgaccagaatccaaagagatttctaaatcccactttttctttcttttcagttctttacgtattgtcacccagagaacagtgttcactaaaaacattattcccactgccagatagaaaaggacatgaaaccagacaggagttggtaactggaggccaagcacttgaagctccaactcagggctgcgcttaaggacatttccatcctctgtggcagcctcgcaccantataacccagagtcttctcttctagcagttagtatttggtattcagaggatgtgttcctgcctcgcggggtcttgctgcccatgtanaaggagaagtaaagctgcaaaccagg

SEQ ID NO: 8617 - DNA, 183 bp, Homo sapiens
cctttctgtttgatgcctgctcgggaggttggcttcagctccaggctttcctgatccgtggcatccaggatcttgtacttgcttttcctcttgggttttcctttttgcctcttacaacaacagatcacagtccaagacaggattcccaaggcaacaacaatgacaaaggtagcaatgataaca

SEQ ID NO: 8618 - DNA, 307 bp, Homo sapiens
gtcctggcagatgctctcaagagtatcaacaatgccgaaaagagaggcaaacgccaggtgcttattaggccgtgctccaaagtcatcgtccggtttctcactgtgatgatgaagcatggttacattggcgaatttgaaatcattgatgaccacagagctgggaaaattgttgtgaacctcacaggcaggctaaacaagtgtggggtgatcagccccagatttgacgtgcaactcaaagacctggaaaaatggcagaataatctgcttccatcccgccagtttggtttcattgtactgacaacctcag

SEQ ID NO: 8619 - DNA, 411 bp, Homo sapiens
ctgggcaagaaatgcctcaggaggtttttatttttcctcttcagatagatgttgcttcctgccaattgcatcctgtacccactgttccttctggattccatgatttaccatccagcagggcttttctgagtcgtctccagaagatgtgccgccccaggacactgtcctcccactccaggtaagtgttcctgctgagaaggcggtacagctccacctgctgcctgagcagggtcttctccaccttctgcaggacaatgaagatgataccagcacgactgctcagaaactgccaggtctgagcaatctcatattcaaagatacaccagcggctctggatgaagtgctgggacaccacaacaatcacctttcggcttttatggaaaccttcatggatgatgttggcagcaatgg

SEQ ID NO: 8620 - DNA, 399 bp, Homo sapiens
ccatgtctagagccagacttggactttatatcttcgccagagtatccctcttccaaaactgttttgaactgactccagctttcagtcagctcacagctcgcccccttcatttgcatataattccaacagaacctttcccaactactagaaagaatggagagagaccatctcatgaagtacaaataataaaaaatatgccccagatggcaaactttgtatacaacatgtacatgcatttgatacagactacacatcattatcatcagactttattacaactaccacctgctatggtagaagagggtgaggaagttcaaaatcaagaaacagaattggaaacagaagaagaggccatgactgttcaagctgacatcatacccagtccaacagacaccagat

SEQ ID NO: 8621 - DNA, 252 bp, Homo sapiens
ccttggccgctgccgaactgctgaagaaagaaaagatcaacatccgcgtgctggaccccttcaccatcaagcccctggacagaaaactcattctcgacagcgctcgtgccaccaagggcaggatcctcaccgtggaggaccattattatgaaggtggcattggtgaggctgtgtccagtgcagtagtgggcgagcctggcatcactgtcacccacctggcagttaaccgggtaccaagaagtgggaagccag

SEQ ID NO: 8622 - DNA, 546 bp, Homo sapiens
  unsure (480): n=A,T,C or G
  unsure (520): n=A,T,C or G
ctggtgtcaagacctgggttagaggtttgtcaaacagaggcagggcccagtcacctctttggaggggagtgatgagaaggggattttggtcacctgagagggttgagtaaacttggatcagggcacaggcttctctcaccatactcagctttttgcactcactccctagttgagcctactggcatcaagctctagatgccaaggctgggatggctgtggagcaggagctatggcccaagtagctctgagaggggaagagacctaaaacccctagcagggaaaatactgacgctaggtgtgaacatatcctctcttttcacaagagtcctgatggggctggctgagcttttgggtactcatccctactgttatagctggagaggatttgggtattgaagcagggaggggcagatcccacgaagtgactgcagatctggaataataagtaaggggtagatctgcccatagagctcactttanaccggcctatactcctacaaggaattggggtaggatcttntactcagccttgccacaatagaatgg

SEQ ID NO: 8623 - DNA, 443 bp, Homo sapiens
  unsure (8): n=A,T,C or G
agtgtaantcccaaaaattacccaaagaagaagatggaaaagcgatttgtcttcaacaagatagaaatcaataacaagctggaatttgagtctgcccagttccccaactggtacatcagcacctctcaagcagaaaacatgcccgtcttcctgggagggaccaaaggcggccaggatataactgacttcaccatgcaatttgtgtcttcctaaagagagctgtacccagagagtcctgtgctgaatgtggactcaatccctagggctggcagaaagggaacagaaaggtttttgagtacggctatagcctggactttcctgttgtctacaccaatgcccaactgcctgccttagggtagtgctaagaggatctcctgtccatcagccaggacagtcagctctctcctttcagggccaatccccagcccttttgttgagccagg

SEQ ID NO: 8624 - DNA, 252 bp, Homo sapiens
ctgcccagtgagtgtgtgaggggctggtctgtttaactgcttgccctgaaggtgcgaggagagcctgttcgccttgcatccagtgggccaagcttacatagatcccatctcctctgcataccctcagcatcctgatctataaaatgggagtgaatatagcaccttcagccacaccaccagcctgcctgcggcccctgcctcctgcccggcctcctctgaggtcagtgccttcagctcctgctgcactggtgg

SEQ ID NO: 8625 - DNA, 383 bp, Homo sapiens; identical to SEQ ID NO: 7515

SEQ ID NO: 8626 - DNA, 495 bp, Homo sapiens
  unsure (299): n=A,T,C or G
cctggccggcttgatgggactcctggagaaagggcttgggggtcccgagcttctcgatcctcttggaggaatgggggtagtctttcctttgatgctgctgtggccctagcccgggaccgccaaaggactgaggctcaaggagttcggcgaacccagacctgtactgagggtggggattactgcctcatccccagaacctccccttgtagcatgatctctgcccattctcctcggccccttagctgcctggagctcccatctgaaggtgcagaagggtctggatcccggagtcgtcttantctgccccccagagaaccccaggttcctgaccccctgttgtcctctcagcgcagatcatatgcatttgaaacacaggctaaccctgggaaaggtgaaggactgtgattaggaccacagccctgggcaaaggggaccagcaagttgtcttgaatctccagggttcctgactagctgtctcctctgcagcatgagcag

SEQ ID NO: 8627 - DNA, 569 bp, Homo sapiens
  unsure (552): n=A,T,C or G
ccatcttgagtcttggtgggcttggcaagtaaggagacattgaccagattcaaagcttccagaggtggtgagaactccagggccgagtaatggagagtacaaaggtccttcttggcccccatgacccttccaagccaagaacttggcagtagctgtgagaagcagagatagggagaggaggtgaggggcacctatagctcttagccatgagttatgactccctccatccaagggagacccaaggacatgaaaggggactcagttccaaggatcagagggaacttgggttgttttgggataatgactgtggcttgggatgtcacggagatgaacaccagaattggtgtgcaacagatgagctccagtacccctgatagtttgcatgggttttgctctgctgatgatggtcagggacagcagtgaggccctctacaatgccgccttctgcctaaacacaggcagtgcccacaaaaggggagctgtcattatggagcctaggaatggatagtcagagagcagcggctgggcagtgcaactcctgcattggacaangtcctggctagagaatg

SEQ ID NO: 8628 - DNA, 398 bp, Homo sapiens
  unsure (54): n=A,T,C or G
  unsure (156): n=A,T,C or G
  unsure (160): n=A,T,C or G
  unsure (192): n=A,T,C or G
  unsure (215): n=A,T,C or G
  unsure (222): n=A,T,C or G
  unsure (228): n=A,T,C or G
  unsure (250): n=A,T,C or G
  unsure (315): n=A,T,C or G
  unsure (330): n=A,T,C or G
  unsure (358): n=A,T,C or G
  unsure (364): n=A,T,C or G
  unsure (372): n=A,T,C or G
  unsure (392): n=A,T,C or G
tacaagcttttttttttttttttttttttttttttttagggaagtttatttcanaaccattgaacagtatgatatttgctcatttataaatattcccatttaaataatctgagcttatatattttcagtgttaattaaaggacttgatttaaaganagcncaccagtccaaattgaattgattccatagctnttaaaaactaggctcttttacanacactgntacttnttgccccctttgaataaattanaccaatgaataaaacaaacaaacaaataaataaataaatagggaagcggttgctcatcaaaatgngggagcgaatgacanagggtttcttaaaaccaaatgtggccgnggtttntgtcaggngggctttaagtgagtagganaggtga

SEQ ID NO: 8629 - DNA, 558 bp, Homo sapiens
  unsure (351): n=A,T,C or G
ccagtggaatgatgttccctgcaattaccatctcacctatacgtgcaagaaaggaacagttgcttgcggccagccccctgttgtagaaaatgccaagacctttggaaagatgaaacctcgttatgaaatcaactccctgattagataccactgcaaagatggtttcattcaacgtcaccttccaactatccggtgcttaggaaatggaagatgggctatacctaaaattacctgcatgaaccgtaagtggtcctttagaaagaatggactaccgtgctataacaactactagacaccttcattttacggctgtggtatcggcagtttagggtatggagcaagtaatattgngtgttttctttttttctttctttccttccatgtagcatctgcataccaaaggacttattctatgaaatactttaaaaattcctcatcagcaaaggacaattcaataaatacatccaaacatgatcatcgttggagccggaggtggcaggagtcgaggcgctgatccctaaaatggcgaacatgtgttttcatcatttcagccaaagt

SEQ ID NO: 8630 - DNA, 589 bp, Homo sapiens
  unsure (50): n=A,T,C or G
  unsure (231): n=A,T,C or G
ctgggaagccacgagaatattgtgaacctgctgggggcgtgcacactgtnaggaccaatttacttgatttttgaatactgttgctatggtgatcttctcaactatctaagaagtaaaagagaaaaatttcacaggacttggacagagattttcaaggaacacaatttcagtttttaccccactttccaatcacatccaaattccagcatgcctggttcaagagaagttcanatacacccggactcggatcaaatctcagggcttcatgggaattcatttcactctgaagatgaaattgaatatgaaaaccaaaaaaggctggaagaagaggaagacttgaatgtgcttacatttgaagatcttctttgctttgcatatcaagttgccaaaggaatggaatttctggaatttaagtcgtgtgttcacagagacctggccgccaggaacgtgcttgtcacccacgggaaagtggtgaagatatgtgactttggattggctcgatatatcatgagtgattccaactatgttgtcaggggcaatgcccgtctgcctgtaaaatggatggcccccgaaagcctgtttgaaggca

SEQ ID NO: 8631 - DNA, 453 bp, Homo sapiens
gtacaactagaggaaagcggaagagggttgatgtggaagaatcagaggcgagtagtagtgttagcatctctcattccgcctcagccactggaaatgtttgcatcgaagaaattgatgttgatgggaaatttatccgcttgaagaacacttctgaacaggatcaaccaatgggaggctgggagatgatcagaaaaattggagacacatcagtcagttataaatatacctcaagatatgtgctgaaggcaggccagactgttacaatttgggctgcaaacgctggtgtcacagccagccccccaactgacctcatctggaagaaccagaactcgtggggcactggcgaagatgtgaaggttatattgaaaaattctcagggagaggaggttgctcaaagaagtacagtctttaaaacaaccatacctgaagaagaggaggaggaggaagaagcag

SEQ ID NO: 8632 - DNA, 553 bp, Homo sapiens
cgagcagacacattccgaatactaaaattccttaggaaaattagtcattgcccatgtgtgatagctgttttccattttgaattttaaccattttgggaaaaggaagagaatgggaaataccagtatagtccgaaaagcccttaaaaaatgagtgcgaaaagtggaagggtggagtggacataggaagatgatgaacttgtcattttttcctttccatagcttcattttattgtgtcaaagttgcagaaagcacttcactttcatcgaggctctttttaggcagggtacagccaagaaaacttttttatggctcagatgtaaatcctagaaaacgtagtagaaatgatggcaggatctctaactgtaaaataacagtagtgttagtagtaagtgtcattataataacgttatagaactctgcacatcaaaaataccacattttatcatgatctctgcaagagatttctgttggtagtcattctagacttctaataaataatacgttgagtaggaaaggttctgtgaggatccaaataataatgaaaatgacagt

SEQ ID NO: 8633 - DNA, 356 bp, Homo sapiens
cctttcaccacaactcggatgtggatcacgcccttttgtttagctctcgccgctgcggctatgcctgctgtctgtgctgcgatgcctgtgcccttcttggcattccgaaatccctctgtgccacaggaagcaaaggcaaggggctcattactagcagagactacctggatctgtgtgttgttgtgggatgctttaatgtgtgcaattgggatctcctcaaatttctttcctgcccacctcagagagctctcctctcctgaacttggtgtggctgggagccgcgttctgttcaactttctgcttggccgcagcgtcttggagctgtcgagcgcctgtgcagatggtcccggccggcg

SEQ ID NO: 8634 - DNA, 244 bp, Homo sapiens
gctcacctcactaaccagtatatgcagagaatggcaagtgtacgagctgttcccaaccctgtaatcaacccctaccagccagcacctccttcaggttacttcatggcagctatcccacagactcagaaccgtgctgcatactatcctcctagccaaattgctcaactaagaccaagtcctcgctggactgctcagggtgccagacctcatccattccaaaatatgcccggtgctatccgcccag

SEQ ID NO: 8635 - DNA, 435 bp, Homo sapiens
  unsure (276): n=A,T,C or G
  unsure (277): n=A,T,C or G
  unsure (307): n=A,T,C or G
  unsure (308): n=A,T,C or G
  unsure (322): n=A,T,C or G
  unsure (327): n=A,T,C or G
  unsure (368): n=A,T,C or G
  unsure (375): n=A,T,C or G
  unsure (388): n=A,T,C or G
ctgaaacttatttttatattcattccataaatactgatcacatatctttttctgggtgcttagagtacattaaagaacaaaacaaagattgctgccctcttgtagcttatactctgataaggaaaaacaagcaataaatacaagtgaattttatagtatattaaatgatgatgagtgctttgaaaaaattgaaaggtagatcaggataatcggggtgggataagcattatatgtagcgggtttttttggttggttttttttttttttggtttttgnntttttgagatggagtctcgctctgttgccnnggtatagtggcacnatctnagctcactgcaacctccagctccctggttcaagtgattatnctgcctnagcctcccgagtngctgggattacaggcacatgcctccatacccagctaatttttgtatt

SEQ ID NO: 8636 - DNA, 552 bp, Homo sapiens
ctgagctttgtgaccagtgccagggtttatgaaacattatacatctaaaaaaaaaaaagtaaaaaaagaggcatttaacaataatcagacacatccacacattaaaactgatttccactgctgatttatacattatctagttgtttaaaaatcgcaatcaacatcccaacatctttttaagagtacaatgggcaaagatcaaagacagataaataataatataataaattagagcatgtaatacatcctatgggaattgctgaatcaacattattttccattggggggtatatatttttggtttatctttatcttttctgctgttattttttttctctgcttgataaaatggggctcattcctaaagccagcttgctgagacactaatttcagaagctcacttgtcacttgtttaacctctgagaatactcaggaacacatggttcccagcagcttgggctgggtctttatggaagtgaaatgcacatagatgaacacacgcactcacgtgcgcacacacaccacacacacacacagacacgcagtcacaca

SEQ ID NO: 8637 - DNA, 509 bp, Homo sapiens
  unsure (29): n=A,T,C or G
  unsure (53): n=A,T,C or G
  unsure (106): n=A,T,C or G
  unsure (142): n=A,T,C or G
  unsure (160): n=A,T,C or G
  unsure (176): n=A,T,C or G
  unsure (334): n=A,T,C or G
  unsure (370): n=A,T,C or G
  unsure (424): n=A,T,C or G
  unsure (496): n=A,T,C or G
  unsure (501): n=A,T,C or G
ccacaagctgatggttactagaactaggngtctgaagtttaaaattctacacnataaaatatctaaaaaatttgtgtcacagaatttcaatagcaattaaattcangaaaagatattcaaatgtcttaatagcaattaccanataataaaaagttattgnaaaagaaaacctttgngttacagattttcactgaattcagacttataaagaattatgcaaatgtatgtaagagtaattattgattaatagattaacagtatttaggaaaaccctatgatgtcataaaagttaatggaaactgtatacgattacagtaagtaataaaattatgtnataaatctttccatactaaaattgttgttttcaaanaagtgaacttcattgttaacattgcgggcacaaagagtttcatcttctgaccangatggacaccaattttgcatttttttctggatgaaagatttcaaacatgtcccagttttcacatcataaagntgtangttgggta

SEQ ID NO: 8638 - DNA, 515 bp, Homo sapiens
ccacaagctgatggttactagaactaggtgtctgaagtttaaaattctacacgataaaatatctaaaaaatttgtgtcacagaatttcaatagcaattaaattcaggaaaagatattcaaatgtcttaatagcaattaccagataataaaaagttattgtaaaagaaaacctttgtgttacagattttcactgaattcagacttataaagaattatgcaaatgtatgtaagagtaattattgattaatagattaacagtatttaggaaaaccctatgatgtcataaaagttaatggaaactgtatacgattacagtaagtaataaaattatgtcataaatctttccatactaaaattgttgttttcaaagaagtgaacttcattgttaacattgcgggcacaaagagtttcatcttctgaccaggatggacaccaattttgcatttttttctggatgaaagatttcaaacatgtcccagttttcacatcataaagttgtaggttgggtatcccag

SEQ ID NO: 8639 - DNA, 351 bp, Homo sapiens
  unsure (46): n=A,T,C or G
  unsure (75): n=A,T,C or G
  unsure (193): n=A,T,C or G
ctgatggttactagaactaggtgtctgaagtttaaaattctacacnataaaatatctaaaaaatttgtgtcacanaatttcaatagcaattaaattcaggaaaagatattcaaatgtcttaatagcaattaccagataataaaaagttattgtaaaagaaaacctttgtgttacagattttcactgaattcanacttataaagaattatgcaaatgtatgtaagagtaattattgattaatagattaacagtatttaggaaaaccctatgatgtcataaaagttaatggaaactgtatacgattacagtaagtaataaaattatgtcataaatctttccatactaaaattg

SEQ ID NO: 8640 - DNA, 249 bp, Homo sapiens
  unsure (8): n=A,T,C or G
  unsure (9): n=A,T,C or G
  unsure (39): n=A,T,C or G
  unsure (49): n=A,T,C or G
  unsure (54): n=A,T,C or G
  unsure (56): n=A,T,C or G
  unsure (98): n=A,T,C or G
  unsure (108): n=A,T,C or G
  unsure (114): n=A,T,C or G
  unsure (236): n=A,T,C or G
  unsure (243): n=A,T,C or G
aaaggcanngccctggtacctgacagtgtaaagaagganctcctacaangaatnanaacattccttgctcagcatgccagcctttaagattgaattanattgtgttgntgtggntttatttctgaaagtaaaacttgccataaattagaaaacaatttcccaaaataaaatccttttttgtatgatggtatacagttttcagtaatgatgtatacattgtattgatttttttcccntaaatgngttatt

SEQ ID NO: 8641 - DNA, 257 bp, Homo sapiens
  unsure (194): n=A,T,C or G
ctgggactgaaaccccgcacgcagccgccggagtttccaaactgcgatcccttctcacccaaagaaacaaggggagtatgatccatgatcaacaacatgctaaagttaaacaagaaaatggtacaaaatagaaattattaccatacatgtccagcatgcaggattaatatttttaatgcagattttttgtattnttctatataatcgagcaggcaataaaactgatgagatttgggcgccgagcgtcctaactgagg

SEQ ID NO: 8642 - DNA, 376 bp, Homo sapiens
  unsure (212): n=A,T,C or G
  unsure (232): n=A,T,C or G
  unsure (276): n=A,T,C or G
  unsure (291): n=A,T,C or G
  unsure (292): n=A,T,C or G
  unsure (340): n=A,T,C or G
  unsure (346): n=A,T,C or G
  unsure (347): n=A,T,C or G
ctttgacctatatttggtgtggcttctatcctatgaaaagggaattgagtgttttgactcgtcgtttcccacctgttgggcctgtctgtaggtataccttctaaaatcaactgacatctccattttgctacagagtagcaaaaatcaacaatttttaagcatactaatggtgtgcatttgatctgaaccttcttgatgctatcatgtttcanctgtgaatatagcctgtcanatgcttagaacaatcagttgaactggtatgagtggctgcattanggctttacaaatcgnnaggactgaattttggtgggtttagagagtgcatttttatagctgagtngaatgnnatgagttcactacaggcttttggcaaagg

SEQ ID NO: 8643 - DNA, 542 bp, Homo sapiens
  unsure (9): n=A,T,C or G
  unsure (526): n=A,T,C or G
  unsure (539): n=A,T,C or G
ttggtctanagctttataaggccattcagcgagggaccatcaagtgcaactttgcgggggttgccttgggtgattcctggatctcccctgttgattcggtgctctcctggggaccttacctgtacagcatgtctcttctcgaagacaaaggtctggcagaggtgtctaaggttgcagagcaagtactgaatgccgtaaataaggggctctacagagaggccacagagctgtgggggaaagcagaaatgatcattgaacagaacacagatggggtgaacttctataacatcttaactaaaagcactcccacgtctacaatggagtcgagtctagaattcacacagagccacctagtttgtctttgtcagcgccacgtgagacacctacaacgagatgccttaagccagctcatgaatggccccatcagaaagaagctcaaaattattcctgaggatcaatcctggggaggccaggctaccaacgtctttgtgaacatggaggaggacttcatgaagccagtcattancattgtggacganttg

SEQ ID NO: 8644 - DNA, 382 bp, Homo sapiens
  unsure (173): n=A,T,C or G
  unsure (224): n=A,T,C or G
  unsure (234): n=A,T,C or G
  unsure (256): n=A,T,C or G
  unsure (272): n=A,T,C or G
  unsure (282): n=A,T,C or G
  unsure (283): n=A,T,C or G
  unsure (297): n=A,T,C or G
  unsure (301): n=A,T,C or G
  unsure (308): n=A,T,C or G
  unsure (316): n=A,T,C or G
  unsure (326): n=A,T,C or G
  unsure (352): n=A,T,C or G
cctgaatctgatgcaccgtcttctgctcgtgccatggtttttgtttttgttttttcttaattgagtcatctttacttaaaaatgctaatttccagcttcacttgtaagatcagaatatctgaaaacactttacacttattccaaaatgactccaactggttggagctaagtanaacttagagcctatgatgattaattttatgtgttgatttgactgggctaangggtgcccanatagctgggaaaacaatatctntgggtgtgcctgtganggcgtttctnnaacaggtgttaatnagtngactgantaaagaanatccaccctnaccaatgtgaataggcctcatccagnccattgagggctcaaataaaacaaacaggc

SEQ ID NO: 8645 - DNA, 554 bp, Homo sapiens
  unsure (521): n=A,T,C or G
  unsure (522): n=A,T,C or G
  unsure (531): n=A,T,C or G
  unsure (540): n=A,T,C or G
ccaagatggttggggcataccttggttttatacattttagggagacataagacattaatcaatatatgtaagaagaacattggttcagtggggagggagcttccaggtcacagataggtgagacacaaacagttgcattcttttgagtttctgattagcctttccaaaggaggcaatcagatatgtatctatctcagtgagcagagagataactttgaatagagtgggaggtgggtttgccctaagaagtttccctaagcttgagttttccttagtgattctggggccccaagatattttcctgtcacagttgacatccccaacacagtgtttagggctcagaaaaagataccctaaaatagggtgctttggcatgctgaatgctttgaataaaggaggctgaagggcctcagaaataagagaacaaaggtctgtctctgacccactgctgcccacctcccttcccttccaaagcacagggagggattttctttgaagttctcttatttgattaagggaanntttctccanaaggaaggnaattgtcctggaca

SEQ ID NO: 8646 - DNA, 260 bp, Homo sapiens
gaggttgcggtgagctgagactgcgccattgcactccagcctgggcaacaagagcaaaactccgtctcaaaataaataaataaataaataaataaataaataaataaataaatataaataaaagtagtgggttgatacggtccaatttatttgtcagagatcaccgtggctcttgggtagagaatggatttgaagctggcctaacctagaattggacagacaaaatgggaggctgttgcagtaatctagatggtggatgg

SEQ ID NO: 8647 - DNA, 269 bp, Homo sapiens
ctggccgtctggtgctcgctggtcctgtccttctgccgcctgcacaaacagtccagcatgacggtgatggaagctcaggagagcccgctcttcaacaacgtcaagctacagcgaaagcttcctgtggagtcgatccagattgtattagaggaactgaggaagaaagggaacctcgagtggttggataagagcaagtccagcttcctgatcatgtggcggaggccagaagaatgggggaaactcatctatcagtgggtttccaggagtgg

SEQ ID NO: 8648 - DNA, 491 bp, Homo sapiens
ccaggtttaaagccatcaacaagagatggtatagatctttcattgtctgagtttgagaagagaatcaattccttgttgatgaaatcattataagtcaaatgctttgttgcagtaccatataaaaattgctctggtaagccatgtagcctacgctgtctccggtcttccataaaatttgttaaccattcttttctgtcatcaatcttcttcttactaaatgccaaggtaatggcagcatcatcttcaggaccagcatatctaaacaagatgcgatgcctttccatatcagcaaaatattcctttgcttctttagctgtactagtacccaatcctttatagtactttattttccaggctttctggttttctatatgttttttccattcgtcaaattcaggaatactgtagaaggaaagttcctgcttatttttgcttgcctttacaataggagtaatgaactcttcaagaaaaccatgcttcaaaagtgatgg

SEQ ID NO: 8649 - DNA, 397 bp, Homo sapiens
ccactgtgtagcaccttctaattcaatttcatcggcagttgtaataacagttccagcctcaggtgttttaatggtgggaaacatcttgattgcttctccagaaacttgaccataggttttgttttggaaatcttggagaatctcagttccttccacagcaataagttctgtgggagaagcttccatttcttctaataactcaggtttaccatcatcttctgaaggttctaattttgtgtcaggagataaagagggaggctcagttatgtgaaggtattcctcacttgatggtttgaaagtcgcttcaatatttacatgaatttccttaaaagaatcctgtggggacattacagatgagccgacgtctattcctggcagagcactgggctgggggatc

SEQ ID NO: 8650 - DNA, 546 bp, Homo sapiens
  unsure (452): n=A,T,C or G
  unsure (514): n=A,T,C or G
ctgggagagctagactaagttggtcatgatgcagaagctactcaaatgcagtcggcttgtcctggctcttgccctcatcctggttctggaatcctcagttcaaggttatcctacgcagagagccaggtaccaatgggtgcgctgcaatccagacagtaattctgcaaactgccttgaagaaaaaggaccaatgttcgaactacttccaggtgaatccaacaagatcccccgtctgaggactgacctttttccaaagacgagaatccaggacttgaatcgtatcttcccactttctgaggactactctggatcaggcttcggctccggctccggctctggatcaggatctgggagtggcttcctaacggaaatggaacaggattaccaactagtagacgaaagtgatgctttccatgacaaccttaggtctcttgacaggaatctgccctcanacagccaggacttgggtcaacatggattagaagaggattttatgttataaaagaggattttnccaccttgacaccaggcaatgtagttagcata

SEQ ID NO: 8651 - DNA, 386 bp, Homo sapiens
  unsure (28): n=A,T,C or G
  unsure (37): n=A,T,C or G
  unsure (91): n=A,T,C or G
  unsure (94): n=A,T,C or G
  unsure (104): n=A,T,C or G
  unsure (128): n=A,T,C or G
  unsure (182): n=A,T,C or G
  unsure (257): n=A,T,C or G
  unsure (290): n=A,T,C or G
  unsure (295): n=A,T,C or G
  unsure (320): n=A,T,C or G
  unsure (374): n=A,T,C or G
  unsure (378): n=A,T,C or G
catgatgcacaagctactcaaatgcagncggcttgtnctggctcttgccctcatcctggttctggaatcctcagttcaaggttatcctacncanagagccaggnaccaatgggtgcgctgcaatccanacagtaattctgcaaactgccttgaagaaaaaggaccaatgttcgaactacttncaggtgaatccaacaagatcccccgtctgaggactgacctttttccaaagacgagaatccaggacttgaatcgtntcttcccactttctgaggactactctggatcangcttnggctccggctccggctctggatcangatctgggagtggcttcctaacggaaatggaacaggattaccaactagtagacnaaantgatgctt

SEQ ID NO: 8652 - DNA, 488 bp, Homo sapiens
  unsure (197): n=A,T,C or G
  unsure (328): n=A,T,C or G
  unsure (335): n=A,T,C or G
  unsure (407): n=A,T,C or G
ggttggggcataccttggttttatacattttagggagacataagacattaatcaatatatgtaagaagaacattggttcagtggggagggagcttccaggtcacagataggtgagacacaaacagttgcattcttttgagtttctgattagcctttccaaaggaggcaatcagatatgtatctatctcagtgagcanagagataactttgaatagagtgggaggtgggtttgccctaagaagtttccctaagcttgagttttccttagtgattctggggccccaagatattttcctgtcacagttgacatccccaacacagtgtttanggctcanaaaaagataccctaaaatagggtgctttggcatgctgaatgctttgaataaaggaggctgaagggcctcagnaaataagagaacaaaggtctgtctctgacccactgctgcccacctcccttcccttccaaagcacagggagggattttcttt

SEQ ID NO: 8653 - DNA, 493 bp, Homo sapiens
  unsure (117): n=A,T,C or G
  unsure (158): n=A,T,C or G
  unsure (165): n=A,T,C or G
  unsure (225): n=A,T,C or G
  unsure (234): n=A,T,C or G
  unsure (252): n=A,T,C or G
  unsure (279): n=A,T,C or G
  unsure (308): n=A,T,C or G
  unsure (332): n=A,T,C or G
  unsure (386): n=A,T,C or G
  unsure (389): n=A,T,C or G
  unsure (465): n=A,T,C or G
  unsure (486): n=A,T,C or G
ccatagaaagataactgctgtaagattcagtgttggtacattcacaccccattcttttttttttttttccccatcagtcaatcttatctggtaatgggatcattactgttatccagngccaatggtctcagtagtatttccattcaaaaataatttancttttanattaaggatttctctttttgttttattaaacattgaaaggtgggactttaaaaaatggtntaaatctanattttaaggattcttttnttacaaactgtctcagctttttacaanaaatgtttaaataccaaaatgctgctcanaaaatttaaagtttaattgcccgnggttattctactgtttctatcccaatgtgtgctcctctgtactgcgtgtgtaanacnctcagttcatctgaatgtttggatgggaagttttgtgttgagcctccaggcatagcactggaccagcccaggccgntgtggcaaaacgggagggganaatggga

SEQ ID NO: 8654 - DNA, 559 bp, Homo sapiens
  unsure (546): n=A,T,C or G
cctttaaaattccattatcttaggatgtttttaaatgattactttaaatgtgattatttcctaaaccacacaagagtaaaatagagcatttattgatggaataacaaaagtgcttttcttaaatattcttcaaaatacatttgtacaacttacaataatatatccaaaataactgtatatacaaaacattacctagttttaatgtatgtgcttttttccccaaaaattacaaagtaacttcttttttttttggcaaagttcaaccttaacagaggtgacaattttaaaggttggtttaagaaaatagaacctgagggaaattgacacgcaagagtcaatgacaagcaagagatttggaggaatatttttagtttgttaaattaaaaatgttttttagagtgatacttttcacattacaaaaataaaccaaaatgaagaaaaggtcactgtaaaatgatggaaaaaggatctgtagatttgcttttagtatttcaaatagccaacaatgcatgtcagaaaatgaatgcaagatcacaacagtcttgnatttactttgtat

SEQ ID NO: 8655 - DNA, 553 bp, Homo sapiens
  unsure (436): n=A,T,C or G
  unsure (521): n=A,T,C or G
cttacatcattcttttaaaagtagtcttttattaagagtcaaaaattttatatttttgttttcgttggactaattctaaaatttaagttcctcttacggaatgttatcaaaaattatatagttatatgcttagaagtcttctattgattaagccatcaaacttaagtacatcaaaatttgtactttaaagtttaaattcttttttccttgtgaacataatcctataaactaaaattttcctggaccaagttatttttgtagtttactaatatacaattgatcaaaacaatataaagctatcgtaacatgtgaaagattatacaaattgtaaaaattttgttggaaatatgtcttaatgagatgattagggctgtttttcccaattcacatttccgtagggaaatattccttaaaactagaatgtggcatggcttancacatttcactctcattttgtttgatagatgtaaataccgagaaaatctgtttacataagtagatgaaaatgatagttttattgngcactgctactcaatttttaaaagcaatttct

SEQ ID NO: 8656 - DNA, 430 bp, Homo sapiens
  unsure (208): n=A,T,C or G
  unsure (304): n=A,T,C or G
  unsure (320): n=A,T,C or G
  unsure (368): n=A,T,C or G
  unsure (378): n=A,T,C or G
  unsure (398): n=A,T,C or G
  unsure (414): n=A,T,C or G
  unsure (418): n=A,T,C or G
ccagcgacagcctggcctgggaatggactggcagctcatcactaaaatgactcctttcatggaatccactgttatgcagccacactgaccacagagcaactgaataggtgagcattggattgttgatgacaactcttcagcagaacaattgtgtgtttgaagggactgttttatgatgaaataactgttatttcctggagctaattgntgaatgacagtttgtcaactgtttaaatgaatttcatttgaattaacaattatacagccactcagaggtcctacattcgccagagttggcatccanttgatgggttcatttnaattaaatggtttggaggctaacgtgattttttaaattgaatttcatnactattctgngtattctatttatcactatnctaaatgactcatggntggntaattgattatc

SEQ ID NO: 8657 - DNA, 309 bp, Homo sapiens
  unsure (10): n=A,T,C or G
  unsure (16): n=A,T,C or G
  unsure (30): n=A,T,C or G
  unsure (42): n=A,T,C or G
  unsure (112): n=A,T,C or G
  unsure (148): n=A,T,C or G
  unsure (165): n=A,T,C or G
  unsure (184): n=A,T,C or G
  unsure (192): n=A,T,C or G
  unsure (221): n=A,T,C or G
  unsure (237): n=A,T,C or G
  unsure (239): n=A,T,C or G
  unsure (241): n=A,T,C or G
  unsure (261): n=A,T,C or G
  unsure (271): n=A,T,C or G
  unsure (286): n=A,T,C or G
ctggaatccncagttnaaggttatcctacncagagagccagntaccaatgggtgcgctgcaatccagacagtaattctgcaaactgccttgaagaaaaaggaccaatgttcnaactacttccaggtgaatccaacaagatcccccgtntgaggactgaccttttnccaaagacgagaatccagnacttgaanacgtatcttcccactttctgaggactacntctggatcaggcttcngntncggctccggctctggatcangatctgggantggcttcctaacggnaatggaacaggattaccaactag

SEQ ID NO: 8658 - DNA, 555 bp, Homo sapiens
  unsure (456): n=A,T,C or G
  unsure (539): n=A,T,C or G
ctggtattttgcctaagatctatttaagataaccttttcttatattttttacttaatattgggcataatcgtatcattcaagattaagtctgggctatttctttgataagaactgaatgtggccgggcgcagtggctcacgcctgtaatcccagcactttgggaggccgaggtgggtggatcacaaggtcaggagatcgagaccatcctggctaacacggtgaaaccctgtctctactaaaaatacaaaaaattagccgggcgtggtggcgggcgcccgtaatcccagctactcgggaggctgaggcaggagaatggcgtgaacccgggaggtggaggttgcagtgagccgagattgcgccactgcactccagcctgggcgacagagcgagactgtctcaaaaaaaaaaaaaaaaaaaaggaacggaatgtactggagatgtatttgataaccaangttttaggtaaattttcaccagtattagttctatttgcaaactgaaaaatgttgtaggcttaatataaaataaccacattagngaacattatatctctt

SEQ ID NO: 8659 - DNA, 508 bp, Homo sapiens
gaaaagcagcttctaatgagccaataaaaaatacaggatggcaatcaccatatcttgaagaaaactctgctgtaaattgtaataaggcatctccttcattttctgcgttttctggcactaaaaaacaaacaaaagaaaaaacaaaaacaaaaaaacaaaacaaatagacacaaaaacaaaccacataacatctaatcccacatataagaaatatattcaatcaataaagaggaaataaaattaaattttagcttctgtgatatatctgaggggatagtttaactcaacatatattagatctcatcaaaccagaatcaaaaagaaccttaaaatattccaagctcataaattttgaaaaaccaatggacacaatcctgctaagcatttaaaatatgtgcccagttgtcatttaggatttcaatgttttcttgaaatagacatcttgtgactaaattatattaaatgggtctgatattattttaaagacttcattaattggggaaaataa

SEQ ID NO: 8660 - DNA, 449 bp, Homo sapiens
ctgggagagctagactaagttggtcatgatgcagaagctactcaaatgcagtcggcttgtcctggctcttgccctcatcctggttctggaatcctcagttcaagaaagacgagaatccaggacttgaatcgtatcttcccactttctgaggactactctggatcaggcttcggctccggctccggctctggatcaggatctgggagtggcttcctaacggaaatggaacaggattaccaactagtagacgaaagtgatgctttccatgacaaccttaggtctcttgacaggaatctgccctcagacagccaggacttgggtcaacatggattagaagaggattttatgttataaaagaggattttcccaccttgacaccaggcaatgtagttagcatattttatgtaccatggttatatgattaatcttgggacaaagaattttataga

SEQ ID NO: 8661 - DNA, 95 bp, Homo sapiens
  unsure (35): n=A,T,C or G
  unsure (39): n=A,T,C or G
  unsure (88): n=A,T,C or G
  unsure (92): n=A,T,C or G
actacttccaggtgaatccaacaagatcccccgtntgangactgacctttttccaaagacgagaatccaggacttgaatcgtatcttnccanttt

SEQ ID NO: 8662 - DNA, 600 bp, Homo sapiens
gttaggagttcctcatggacctcgaagatgtgtggttccccaggccattgagctccataaagagaaggttgtttgtattgctgctggactgaggcatgcagtagctgctacagcgagtggcatcgtgttccagtgggggactggtttggcatcatgtggacgacggttgtgccctgggcagactcttccattgtttttcacagcaaaggaaccaagcagagtgacaggtctagagaattctaaagcaatgtgtgttcttgctggctcagaccactcagcttcattaacagatgcaggagaggtgtatgtttggggaagcaacaagcatgggcaactggctaatgaggctgctttccttcctgtgccccagaaaatagaagcacattgtttccagaatgaaaaggtcactgccatctggagtggatggacacacctggttgctcagacagaaactggcaagatgtttacctggggccgagcagactatggtcagctagggaggaagttggagacttatgaaggctggaaactagaaaagcaagattcatttctcccctgttcaagaccaccgaacagcatgccttcatctccgcattgctt

SEQ ID NO: 8663 - DNA, 252 bp, Homo sapiens
  unsure (9): n=A,T,C or G
  unsure (15): n=A,T,C or G
  unsure (21): n=A,T,C or G
  unsure (30): n=A,T,C or G
  unsure (56): n=A,T,C or G
  unsure (59): n=A,T,C or G
  unsure (61): n=A,T,C or G
  unsure (73): n=A,T,C or G
  unsure (132): n=A,T,C or G
  unsure (146): n=A,T,C or G
  unsure (148): n=A,T,C or G
  unsure (200): n=A,T,C or G
  unsure (232): n=A,T,C or G
  unsure (240): n=A,T,C or G
gtgagctgngactgngccatngcactccancctgggcaacaagagcaaaactccgnctnanaataaataaatnaataaataaataaataaataaataaataaatataaataaaagtagtgggttgatacggnccaatttatttgtnanagatcaccgtggctcttgggtagagaatggatttgaagctggcctaacctanaattggacagacaaaatgggaggctgttgcantaatctanatggtggatggt

SEQ ID NO: 8664 - DNA, 517 bp, Homo sapiens
  unsure (467): n=A,T,C or G
ccaatgggtgcgctgcaatccagacagtaattctgcaaactgccttgaagaaaaaggaccaatgttcgaactacttccaggtgaatccaacaagatcccccgtctgaggactgacctttttccaaagacgagaatccaggacttgaatcgtatcttcccactttctgaggactactctggatcaggcttcggctccggctccggctctggatcaggatctgggagtggcttcctaacggaaatggaacaggattaccaactagtagacgaaagtgatgctttccatgacaaccttaggtctcttgacaggaatttgccctcagacagccaggacttgggtcaacatggattagaagaggattttatgttataaaagaggattttcccaccttgacaccaggcaatgtagttagcatattttatgtaccatggttatatgattaatcttgggacaaagaattttatangaaatttttaaacatctgaaaaagaagcttaagttttatcatcctttttt

SEQ ID NO: 8665 - DNA, 565 bp, Homo sapiens
caaggttatcctacgcagagagccaggtaccaatgggtgcgctgcaatccagacagtaattctgcaaactgccttgaagaaaaaggaccaatgttcgaactacttccaggtgaatccaacaagatcccccgtctgaggactgacctttttccaaagacgagaatccaggacttgaatcgtatcttcccactttctgaggactactctggatcaggcttcggctccggctccggctctggatcaggatctgggagtggcttcctaacggaaatggaacaggattaccaactagtagacgaaagtgatgctttccatgacaaccttaggtctcttgacaggaatttgccctcagacagccaggacttgggtcaacatggattagaagaggattttatgttataaaagaggattttcccaccttgacaccaggcaatgtagttagcatattttatgtaccatggttatatgattaatcttgggacaaagaattttatagaaatttttaaacatctgaaaaagaagcttaagttttatcatccttttttttctcatgaattcttaaagg

SEQ ID NO: 8666 - DNA, 399 bp, Homo sapiens
agtgaccaggcagtttttctgcctttagctttgacagttcttaattaagatcattgaagaccagctttctcataaatttctctttttgaaaaaaagaaagcatttgtactaagctcctctgtaagacaacatcttaaatcttaaaagtgttgttatcatgactggtgagagaagaaaacattttgtttttattaaatggagcattatttacaaaaagccattgttgagaattagatcccacatcgtataaatatctattaaccattctaaataaagagaactccagtgttgctatgtgcaagatcctctcttggagcttttttgcatagcaattaaaggtgtgctatttgtcagtagccatttttttgcagtgatttgaagaccaaagttgttttacag

SEQ ID NO: 8667 - DNA, 327 bp, Homo sapiens
ccatgaactctatcaagtacagtaccctgttggagagtgagaaaaatactttcatggaaatctggaagaagagatgggataagttcatagcagatgtggctacaaagtgaggagaagctagccagccctctacaagctgtcttcttgcacacgctgtcacttcctctcactcgttcttgaatcagctccatgtgcccatgaaatcaatggcctctgtatggagcgaccctgtgagaagcacttggctggctgagcaaattcatcctctggaaatattctctctcagccacagtgacattgaccctcttggttttctcctctctctgg

SEQ ID NO: 8668 - DNA, 415 bp, Homo sapiens
ctgctggctctatcttctagataacattaacgacgtacggggaggagcccaggatagcaccataaactccctgcatgagatcaatagctatggtgtgccaccctgttcactggcacgctgtgctaaatgaagggcacgatgttcacagttccgtacccacgacttcgctttttccctaaagagcgatctcatgcctgcctagagtcctaaccactcgggaggctgaggtaggaggatcacccaagcccagaaggtcgaggctgcagtgaactgtgattacgccactgtgctccagccagggtgacaaagcgagaccccgtctctatttaaattaaaagaaaaaaaaaagtaactttaacttccattatttactctacccaatgcattatctacccattagggagacatctagttt

SEQ ID NO: 8669 - DNA, 449 bp, Homo sapiens; identical to SEQ ID NO: 8036

SEQ ID NO: 8670 - DNA, 530 bp, Homo sapiens
  unsure (12): n=A,T,C or G
  unsure (110): n=A,T,C or G
accaaaaggttnacagacttggaattttgttccattatataactgagatcattatctaatccctgctctttacataaaactttatgtggttcattttatggtaaggcttnctacgaaataataaaacaatctttttctatagaatttgtggaactagtatttttattttcctgtcatgtcttgccttttctgacttctgtcatacacacaaacacacacacacacagagatacatgtgtatgtttgtttggcaacataggagggacaagcttagtttctcgtattctacgtgtcttataagatcatggtttgctatgtttacagatttatccccttctattagagtacccgaagttcttttaaaatatacaagatgttttcctactggtatgacatccctgaagtacttgtctttctttagttttattcttttagaacaagaaggaaaaaaaaacccgagaaataacctttaaagttttttaaaaattactttgtaagagatgtaagttgaatctcctctatataaagta

SEQ ID NO: 8671 - DNA, 500 bp, Homo sapiens
tctgaccatccatatccaatgttctcatttaaacattacccagcatcattgtttataatcagaaactctggtccttctgtctggtggcacttagagtcttttgtgccataatgcagcagtatggagggaggattttatggagaaatggggatagtcttcatgaccacaaataaataaaggaaaactaagctgcactgtgggttttgaaaaggttattatacttcttaacaattctttttttcagggacttttctagctgtatgactgttacttgaccttctttgaaaagcattcccaaaatgctctattttagatagtttaacattaaccaacataattttttttagatcgagtcagtataaatttctaagtcagcctctagtcgtggttcatctctttcacctgcattttatttggtgtttgtctgaagaaaggaaagaggaaagcaaatacgaattgtactatttgtaccaaatctttgggattcattggcaaataat

SEQ ID NO: 8672 - DNA, 509 bp, Homo sapiens
ctgcactgctggatgcttgcctggttcccagcctttaaggtttttagtctataagttcaacgttgttggaaaagtgctctgatacctgcagaggtgggagaaaggtgggggcagtcctctgctaggagatggaagggacaatcaaagcttagtagcttgagctggtcctggaagagcaagtaggagctctttagccagactaagagaagggcattcttggcagaaggaatattctatataaagaagtggagtcagggaacagtagggctctttgaagaactacagattgtgttctaaatgaatgacatgtaaggtttgtaaggggcgagtgataaccactgatgaatggcagatggtgttgacaactaggcggggccagagtctgtaggatcttacatgtcttgcaatcagttttgactttgaccttggaacccagttgaggctcccttccgccccagttcctcatggcagggaaatacatcatgttgtgcgttgtaagacttcaaaac

SEQ ID NO: 8673 - DNA, 331 bp, Homo sapiens
  unsure (7): n=A,T,C or G
  unsure (10): n=A,T,C or G
  unsure (34): n=A,T,C or G
  unsure (64): n=A,T,C or G
  unsure (99): n=A,T,C or G
  unsure (100): n=A,T,C or G
  unsure (170): n=A,T,C or G
  unsure (254): n=A,T,C or G
  unsure (277): n=A,T,C or G
aatcaanatntaatttttttatttgtactgaaanactaatcataactgttaattctcagccatntttgaagcttgaaagaagagtctttggtattttgnnaacgttagcagactttcctgccagtgtcagaaaatcctatttatgaatcctgtcggtattccttggtatntgaaaaaaataccaaatagtaccatacatgagttatttctaagtttgaaaagtaaaaagaaattgcatcacactaattacaaantacaagttctggaaaaaatattnttcttcattttaaaactttttaactaataatggctttgaaagaagaggcttaat

SEQ ID NO: 8674 - DNA, 243 bp, Homo sapiens
cccaaccagattcctcatagagattcctaatcactagtttcttgtattcataaactcagagatacagagggcttggtttgaagttggggtgagatgaaacctttgctctgagccaaagctctggggccttgcattccctgcattgggttgatgactgtcagcatcactgccgcaggccatgcttgactaaggtacctggttttagccacagccacctccttgtatgttacctttcagctctgg

SEQ ID NO: 8675 - DNA, 497 bp, Homo sapiens
  unsure (11): n=A,T,C or G
  unsure (23): n=A,T,C or G
  unsure (28): n=A,T,C or G
  unsure (38): n=A,T,C or G
  unsure (44): n=A,T,C or G
  unsure (94): n=A,T,C or G
  unsure (193): n=A,T,C or G
  unsure (240): n=A,T,C or G
  unsure (248): n=A,T,C or G
  unsure (254): n=A,T,C or G
  unsure (285): n=A,T,C or G
  unsure (299): n=A,T,C or G
  unsure (407): n=A,T,C or G
ccaagcctcancctttggtccantgcancccttgcctngcttgncaacagtgaaaaattagtttggttagaagaaccatctggaaacacaccancttctgctaccttcatgctcattgttaaaaaaagattaaccagtgtgaacattctgatctgttaattccagggactgttttctttccaatggactgttngttggtagaataacccccaaaagctcaaagctaaaatgcatcatcantcctagtnggcagntccttaagaatggactggcggcgtggttganctgatatggaaaanctgcaccttcctgcagaagatcaactgacctgctatcccaccccaaatttcagcctgaggtatatttcagtgaaggcaggtagctgtgcttctcagagcagagaagcngttttaagagcaaaaaggtagaggaaatctagaaaagaaccgtcttgatacagatttatcccatggtgtgaagggagggcaaagaaccca

SEQ ID NO: 8676 - DNA, 540 bp, Homo sapiens
  unsure (23): n=A,T,C or G
  unsure (24): n=A,T,C or G
  unsure (31): n=A,T,C or G
  unsure (90): n=A,T,C or G
  unsure (98): n=A,T,C or G
  unsure (104): n=A,T,C or G
  unsure (106): n=A,T,C or G
  unsure (117): n=A,T,C or G
  unsure (158): n=A,T,C or G
  unsure (171): n=A,T,C or G
  unsure (172): n=A,T,C or G
  unsure (177): n=A,T,C or G
  unsure (223): n=A,T,C or G
  unsure (261): n=A,T,C or G
  unsure (309): n=A,T,C or G
  unsure (325): n=A,T,C or G
  unsure (348): n=A,T,C or G
  unsure (365): n=A,T,C or G
  unsure (386): n=A,T,C or G
  unsure (451): n=A,T,C or G
  unsure (531): n=A,T,C or G
  unsure (536): n=A,T,C or G
gaaaagaaaaagacttaaattannacttgtngaaatgagtattacaatgactgaaatgaaaagtacactggatagggtgctgtggttcangcctgtantctcancnctttggaaggntgaggcgggcagatcccctgagtttgggagtttgagaccancctgaccaacatnngaganaccccatctctactgaaaatacaaaattacccgggtgtggtggcancatgcctgtaatctcagctactcgggaggctgaggcanaagaattgcttgaatctgggaggcggaggttgtggtgagccaagatcntgccattgcactccancctgggcaacaagagcgaaactncgtctcaaaaaattaantaaataaggcttatgtgcagntattctcaatgagctaaaaagcttcctgaggctagaaattcttgtcatttttggctgggagcagnggcttacacctgtagtttcagcattttgggaggtcgaggcgggcagatcacctgaggtcagggatttgagaccagcctgnacctnggcc

SEQ ID NO: 8677 - DNA, 406 bp, Homo sapiens
ccaattgaaacaaacagttctgagaccgttcttccaccactgattaagagtggggtggcaggtattagggataatattcatttagccttctgagctttctgggcagacttggtgaccttgccagctccagcagccttcttgtccactgctttgatgacacccaccgcaactgtctgtctcatatcacgaacagcaaagcgacccaaaggtggatagtctgagaagctctcaacacacatgggcttgccaggaaccatatcaacaatggcagcatcaccagacttcaagaatttagggccatcttccagctttttaccagaacggcgatcaatcttttccttcagctcagcaaacttgcatgcaatgtgagccgtgtggcaatccaatacaggggcatagccggcgc

SEQ ID NO: 8678 - DNA, 388 bp, Homo sapiens
  unsure (49): n=A,T,C or G
  unsure (289): n=A,T,C or G
ctgcttcaggggaaggcttgtggcttatatctattttgttgtattcctntagttcaacatgtctgcccccacccttacttctaacacctctgcccactccagtattccctcagaacctagcctggtaacgaatatatggacaattaaattacatcccaacatcattcatactttaatatataagaaatcagagcagagaatcagggcagccagtccctgaaggaagagtctgtgacaaatcacaagtatgatcacagcacgaacttttctattctagcctggcctctangaagaaaacagagagtgttaccggacttaaggggaaaaaggacatgcttgatgaaggacagaaccccattgttctccacatttcctggctcacagaagg

SEQ ID NO: 8679 - DNA, 562 bp, Homo sapiens
  unsure (518): n=A,T,C or G
  unsure (535): n=A,T,C or G
ccaatgaacacattacgtcctctgtatggtttttatcaagtaactgccccagtgctcccatgacgctgggcaggtccacttgttaggccagtgagggccatagttcgttggtaattaagtgttaacattgttacactcctttttatggttactggtgatctgatttccagaacaatttgttcactccagattatgatgatggcttttcaatgaagcatacagccaccgcccgtttccagagaaaccaccgcctcatcagtgaaattcttagtgagagtgtggtgccagacgttcggtcagttgtcacaacagctagaatgcaggtcctcaaacggcaggtccagtccttaatggttcatcaggtaaagtcataaaacattcatttcaataagatgtgcctataccacaaatcccaggtgatatgattcctacaccatgcctaaatctacctgttaaatatgtcaatctaacctgttcctgatttggagaagaggtttaaggaagtggacctttcccanatgtttaataagtttgncattaaaaactataatatagaaccttg

SEQ ID NO: 8680 - DNA, 345 bp, Homo sapiens
ccatcacagggactcacatgggagccttttaaaactccagatggtggctgagcacagtgattcatgcctgtcatcccagcactttgggaggccgaggccggtggatcacttgaggccaggagttcgagaccctcctgggcaacatggtgaacccgtctctactaaaaatacaaaaattagctgggtatggtgatacgcgcctgtaatcccagctactcaggaggctgaggcgggagaatcgcttgaacccgggaggcggaggctgcagtgagccagattgtaccacttcactccagcttgggcaacagagcaagactctgtcttggaaaaaaaaaatacagatgg

SEQ ID NO: 8681 - DNA, 562 bp, Homo sapiens
ctgggcttcattggtaagatgttcaagtcgctggacctgagcctgattgtagagttcattctcatgttctaccgggacaagcccatcgactggctcctggaccatattctgtgggtgaaagtctgcaaccccgagaaggatgcgaagcactgtgaccggcagaaagccaacctgcggatccgcttcaaaccgtccctcttccagcacgtgggcactcactcctcgctggctggcaagatccagaaactgaaggacaaagactttggaaagcaggcgctgcggaaggagcatgtgaacccgccagcagaggtgagcacgagcctgaagacataccaccacttcaccctggagaaagcctacctgcgcgaggacttcttctgggccttcacccctgccgcgggggacttcatccgcttccgcttcttccaacctctaagactggagcggttcttcttccgcagtgggaacatcgagcacccggaggacaagctcttcaacacgtctgtggaggtgctgcccttcgacaaccctcagtcagacaaggaggccctgcaggagggcc

SEQ ID NO: 8682 - DNA, 570 bp, Homo sapiens
  unsure (529): n=A,T,C or G
ctgaagggtacagccatttcatagggtcctctcagagagtatttggtttgctttcctaactttctaaaaatagtagattacacaggccacctccatctcatggctcaagaactcagaaaaggctggactatggatttaagcaatacacaggacacattttattaaagaagtcaggattattacaagttttctaaatttttttccgtttactctgtgagagaatgcaaatgatctagcggttaatggcatggaaacctcataacgctcccaaatttcagaacttcaagcatgagtcatacagttactttaacagttttaaaatatgtttttgatctattttagccacaagactgaatacaagaggactgctatctgaagggaaggattctaaatactgtacaaagaatcacatgtgtcagttataaatatatacacacacacgtaagaaacatgttttttaacataaatgcttaattacatattcaaaattgttttaatgcttaacataattattttactaacatttaanaagctactgtcctgggtatgaagctccatcataaataaatt

SEQ ID NO: 8683 - DNA, 454 bp, Homo sapiens
ccactaatgtgccatcttgagttggaaaacaagccccctccccccaaaaaaaaccctgccgctttggtgtcctatttatatatttttaaaaacattcattaaaaaaatcaaatctataataaaaatgtccctgtttgttttaaaaaagcattagtaggcatcccttatctactaaaaccatttgtttttcctaagatgcctggaagcagaaaagcgagtgagattaactcactgcgcaattaattaaaattagaattctttcctctaaacaacttccagagcaccagaaagaagaaggggccccatcaaagggagaaataaagcccttctgactcacaggagatgaaatgttcagccagagttctaacacattctggctgtcatcaaaagttctttattggattactcagaaaataactcaagtgctattttaaaaatgaaagatacaggcagc

SEQ ID NO: 8684 - DNA, 574 bp, Homo sapiens
  unsure (209): n=A,T,C or G
  unsure (216): n=A,T,C or G
  unsure (269): n=A,T,C or G
  unsure (349): n=A,T,C or G
  unsure (423): n=A,T,C or G
  unsure (424): n=A,T,C or G
  unsure (426): n=A,T,C or G
  unsure (507): n=A,T,C or G
  unsure (508): n=A,T,C or G
  unsure (530): n=A,T,C or G
  unsure (534): n=A,T,C or G
  unsure (554): n=A,T,C or G
ccaaaaaaatcaagatttaatttttttatttgtactgaaaaactaatcataactgttaattctcagccatctttgaagcttgaaagaagagtctttggtattttgtaaacgttagcagactttcctgccagtgtcagaaaatcctatttatgaatcctgtcggtattccttggtatctgaaaaaaataccaaatagtaccatacatganttatttntaagtttgaaaagtaaaaagaaattgcatcacactaattacaaaatacaagtnctggaaaaaatatttttcttcattttaaaactttttaactaataatggctttgaaagaagaggcttaatttgggggtggnaactaaaatcaaaagaaatgattgacttgaaggtctctgtttggtaagaatacatcattagcttaaataagcannanaaggttagttttaattatgtagcttctgttaatattaagtgttttttgtctgttttacctcaatttgaacagataagtttnnctgcatgctggacatgcctcanaacncatgaatagcccggtactanatcttgggaacatggatctt

SEQ ID NO: 8685 - DNA, 592 bp, Homo sapiens
  unsure (559): n=A,T,C or G
gccagatgcaatacaagattcctggttaaatttgaatttcagtaaacaatgaatagtttttcattgtaccatgaaatatccagaacatacttatatgtaaagtattatttatttgaatctacaaaaaacaacaaataatttttaaatataaggattttcctagatattgcacgggagaatatacaaatagcaaaattgaggccaagggccaagagaatatccgaactttaatttcaggaattgaatgggtttgctagaatgtgatatttgaagcatcacataaaaatgatgggacaataaattttgccataaagtcaaatttagctggaaatcctggatttttttctgttaaatctggcaaccctagtctgctagccaggatccacaagtccttgttccactgtgccttggtttctcctttatttctaagtggaaaaagtattagccaccatcttacctcacagtgatgttgtgaggacatgtggaagcactttaagttttttcatcataacataaattattttcaagtgtaacttattaacctatttattatttatgnatttatttaagcatcaaatatttgtgcaagaat

SEQ ID NO: 8686 - DNA, 348 bp, Homo sapiens
tgaaggtcagggggtgctttgaccattccaaggagctgtatatgatgccccggaccatggtggaccctgtccgggaggcccgggagggcggcctcatctccttctcaactcagagtggggcctatgtggtcactcccttccactgcaccgacctgggagtcaccatcctggtaaatagagggttcgttcccaggaagaaagtgaatcctgaaacccggcagaaaggccagattgagggagaagtggacctcattgggatggtgaggttgacagaaaccaggcagccttttgtccctgagaacaatccagaaaggaaccactggcattatcgagacctggaagctatgg

SEQ ID NO: 8687 - DNA, 580 bp, Homo sapiens
  unsure (351): n=A,T,C or G
ataaagggaagttaaaagccagcagttccagtcagccatcaagctctgaaagtggctcatttctcctcaaatctggcacaacacccctgccacctggagcagccacttctccctccaagagcacaaatggagctcccggtactgttgttgaatcagaagaagaaaaagccaaaaaattactttattgttcactatgcaaagtggctgtgaactccctgtcacagctagaggcacacaacacaggttagcagctatcttttgcatttaaataatgtttataacaaaacccaacttttcccatcagaataccatatcttttgttgttcagaccttaggtttgttccatgcttntctacttttttgattcaaaggagtgattttagaaaagtatgatcatatgactttggaactagcaagacaaaagcagtttggagatcaaacttgttctattctttattttcttaaaaacatctaatactgtccaaaactcattttgatgaagtgacaaagatgaagataaatatttatgcacagtgttcactgcaatacacttaaaagagaaaaaaaatggaaacaacct

SEQ ID NO: 8688 - DNA, 300 bp, Homo sapiens
  unsure (48): n=A,T,C or G
  unsure (49): n=A,T,C or G
  unsure (57): n=A,T,C or G
  unsure (70): n=A,T,C or G
  unsure (88): n=A,T,C or G
  unsure (89): n=A,T,C or G
  unsure (97): n=A,T,C or G
  unsure (120): n=A,T,C or G
  unsure (127): n=A,T,C or G
  unsure (129): n=A,T,C or G
  unsure (163): n=A,T,C or G
  unsure (202): n=A,T,C or G
  unsure (203): n=A,T,C or G
  unsure (213): n=A,T,C or G
  unsure (229): n=A,T,C or G
  unsure (235): n=A,T,C or G
  unsure (274): n=A,T,C or G
  unsure (287): n=A,T,C or G
ctgggactacaggcacctgccaccatgcctggctaaatttttgtattnntagtaganacagggtttcacnagtgttaaccaggatagnntcaatctnctgacctcatgatccgtctgctntggcctncnaaagtgctgcaattacaggcgtgagccactgcgnccagcccaaagtggttaatattaatatgctgagtacctnncatgtgccanacacataagatactgnatgttnctatttcatcaatggagaaacagaagtctgagtggggtnaaagaacgggctncccaatgtcacac

SEQ ID NO: 8689 - DNA, 485 bp, Homo sapiens
  unsure (17): n=A,T,C or G
  unsure (98): n=A,T,C or G
  unsure (135): n=A,T,C or G
  unsure (150): n=A,T,C or G
  unsure (164): n=A,T,C or G
  unsure (191): n=A,T,C or G
  unsure (235): n=A,T,C or G
  unsure (381): n=A,T,C or G
  unsure (414): n=A,T,C or G
  unsure (451): n=A,T,C or G
  unsure (469): n=A,T,C or G
cgccgcttgtgctgcanccatgtctctagtgatccctgaaaagttccaacatattttgcgagtactcaacaccaacatcgatgggcggcggaaaatancctttgccatcactgccattaagggtgtgggccgaanatatgctcatgtggngttgaggaaagcanacattgacctcaccaagagggcggganaactcactgaggatgaggtggaacgtgtgatcaccattatgcanaatccacgccagtacaagatcccagactggttcttgaacagacagaaggatgtaaaggatggaaaatacagccaggtcctagccaatggtctggacaacaagctccgtgaagacctggagcgactgaagaagattcgggcccatanagggctgcgtcacttctggggccttcgtgtccnaggccagcacaccaagaccactggccgccgtggccgnaccgtgggtgtgtccaanaagaaataagtctgta

SEQ ID NO: 8690 - DNA, 584 bp, Homo sapiens
cctgccctgtgacactcaatcacagttgacgtcaggatgggtacaatgtctgcaagagaaaaggggagagcagcaacagcacagtgtctgctgtcctcagtgatacaggcgggattccaccctggttctgtaggaaaacagggtcatggtctctgaactttgctttttctgcaaagaaccagatatgatctgtttaatgaggaaagtacgtagctgtggggtcaggctaactgcccatcaagtgcttttcctttgatgacaccatgttctgccttgtaacactaggacctgcaccccttgaggcaacacttccatgagtttcctttcatgcctcttagatattttttgcatctgacaggactgctgataaaagcattagggggattaatgactttatacactaatctctctgcaggcatcaaattctttcttcaggacagacacccagaattactggctcaaaaacaggaccttttaaaaaatactcttaccacaaattgccaaactgctttctgcaaaggccataccaatttccatccccaccagcagtcatgagagtgcctgtcctatcccataccttgccc

SEQ ID NO: 8691 - DNA, 641 bp, Homo sapiens
  unsure (591): n=A,T,C or G
  unsure (592): n=A,T,C or G
  unsure (605): n=A,T,C or G
ctgcacactgtatcattttcatttctctcccttgctgtcccctctgcctctgtccttgcctcccatcatatggacacactgtgcctgacacacacgctcacataatctctccctttttgtttccctagctactcatcaacctcaggtttgcaggaaaaaaacataagatgaaaagagaaaattgtgtgacagcaccataaataaaattaaagcgatataaaatgtgtaacagagaatgcacaatcaaaataacctaatattcagtgatactccattaacataaatagaccgtctcaaaactcaaagatgccaagtatctcagcaagatttactctctttagacgtaactcatgacaaggcactgggtaaaaactgtaatttgtgaatgccaaataatgacaaataacaaagtaaaatatgctaggtgcaaaaacactcttagtactgaatgaattgacaaagacaccctttatttcaataaccagccaggagaaccttccagccacggtgaagatacgaacgctcagcgagcaaacggtacttactgtgtgctgtggtccaagtaagtgattactctgtctccctcttccnntaagcgtttactnacatggttaagatattctggaaccttacaaacaaaa

SEQ ID NO: 8692 - DNA, 70 bp, Homo sapiens
  unsure (8): n=A,T,C or G
  unsure (15): n=A,T,C or G
  unsure (22): n=A,T,C or G
  unsure (23): n=A,T,C or G
  unsure (40): n=A,T,C or G
  unsure (47): n=A,T,C or G
  unsure (50): n=A,T,C or G
  unsure (62): n=A,T,C or G
  unsure (65): n=A,T,C or G
tcaggaanatcactngaccacnnaagatgaaagctgcagngagctanctntgattgcaccantgnacgcc

SEQ ID NO: 8693 - DNA, 359 bp, Homo sapiens
  unsure (241): n=A,T,C or G
taactatcacccttgtagatattacactaaattaaaacaatagtgatacaaattcccaccttaccaaaatagcaataatccaatttatttcctagtttatttaatcagattctcctaccaaccatctcctcttctattttttaaatcaattaaaataaaggcaagagaaaagctctagttttatgtatttcaaccatagcttggatgttatgttttcccttttcctatatacaaaaataanatttgctcacatctgcacttttggtttagaaaatacatctggcaatcttcagtgatagtgaaaataagaatgctaagatactagagaaccacacctaagcaccctttttgaaagcagg

SEQ ID NO: 8694 - DNA, 590 bp, Homo sapiens
  unsure (566): n=A,T,C or G
ccatatttattcattttccacacacttgaccatctactttgtataacacattctgctaaggcccagggatacaatggcaaacaagatagatgtagttccttcccttgtggcatgtcataagagaaacagatgtgcatatacacacaataaataagaaaattaataattgtattaagtggtatgaaaaaaagggggaggattgttcactcactgttacctgtgttagtatctgcaaatgcatgaatggttgaactcccatgtcagcatttttgttgccatttatttagtaccagacatagtgctggtctcacagcttaatatttggtaatgaataaattctgctagtggtatatgttgatctgaacttacaatgatgggatatagaattggcagagtggcagatgttcacaattgtctacaagtagatgtgctagacaatggaaggatgcaggccaacctctttgattacaattgagattcatgtgactattgagccctggaaatgtagcttgtccaaattgagatgtgctgtcagtataaaatacataccagattttaaagatgtnccaaaaaatgtaaactatctcaat

SEQ ID NO: 8695 - DNA, 536 bp, Homo sapiens
  unsure (14): n=A,T,C or G
  unsure (220): n=A,T,C or G
  unsure (443): n=A,T,C or G
  unsure (486): n=A,T,C or G
gcatcccatgtgcntcgatgggcaaagtatttgtagcactgcccttggaatttgtgccagccatagtcacatgtctcggtatcttgctcacaaagtgcaccaacataacttggaaggcagaggcacctgaatgtgttaaaaccatcaacacaagtggctccattacgacagggattagagtgacattcatcaaaatcaagttcacactggtctccgctgnatcctggcacacaggtgcatacgtaggaagtttcagtaggataacaggtgcctccgttaaggcacgggttcattttgcagcgatcaggtcctggtaaatagattgccgtgccttccactgactcttcattaatgccaatcaggaaatctgtttcattagaagtctccagaagggaaaatggtggtgttgcaacctcagtattaaattccacagggtttactgntgcctgatcattggaatcaagaattctcgctgccacttgctgntctgatgctgctatcgtggaatcctgccctctgattaaagctgcttgagt

SEQ ID NO: 8696 - DNA, 595 bp, Homo sapiens
  unsure (117): n=A,T,C or G
  unsure (143): n=A,T,C or G
  unsure (333): n=A,T,C or G
  unsure (343): n=A,T,C or G
  unsure (489): n=A,T,C or G
  unsure (524): n=A,T,C or G
cttttcttcctccaagtgaaggaaggaatccttagcgatgagatctactgcccccctgagactgccgtgctcttggggtcctacgctgtgcaggccaagtttggggactacaacaangaagtgcacaagtctgggtacctcanctctgagcggctgatccctcaaagagtgatggaccagcacaaacttaccagggaccagtgggaggaccggatccaggtgtggcatgcggaacaccgtgggatgctcaaagataatgctatgttggaatacctgaagattgctcaggacctggaaatgtatggaatcaactatttcgagataaaaaacaanaaaggaacanacctttggcttggagttgatgcccttggactgaatatttatgagaaagatgataagttaaccccaaagattggctttccttggagtgaaatcaggaacatctctttcaatgacaaaaagcttgtcattaaacccatcgacaagaangcacctgactttgtgttttatgccccacgtctganaatcaacaagcggatcctgcagctctgcatgggcaaccatgagttgtatatgcgccgcaggaagcctgaca

SEQ ID NO: 8697 - DNA, 234 bp, Homo sapiens
  unsure (6): n=A,T,C or G
  unsure (15): n=A,T,C or G
  unsure (25): n=A,T,C or G
  unsure (47): n=A,T,C or G
  unsure (48): n=A,T,C or G
  unsure (56): n=A,T,C or G
  unsure (106): n=A,T,C or G
  unsure (127): n=A,T,C or G
  unsure (130): n=A,T,C or G
  unsure (179): n=A,T,C or G
  unsure (191): n=A,T,C or G
  unsure (219): n=A,T,C or G
cttgcncaaatattngatgcttaantaaatacataaataataaatanngttaatangttacacttgaaaataatttatgttatgatgaaaaaacttaaagtgcttncacatgtcctcacaacatcantgngaggtaagatggtggctaatactttttccacttagaaataaaggagaanccaaggcacagnggaacaaggacttgtggatcctggctancagactatggttgcc

SEQ ID NO: 8698 - DNA, 447 bp, Homo sapiens
ccacgtgacccccacctttctgagccaaagcacttaaaacacataataaacattcaaaaccatagcacttagaatcaggaagtccttttatcgtttttcacagtataaggcacttattttttgatatcattctctttttttaaaggcaaaggaattacaagtgaacacactagtcatggcccatcagaatgatagatgcttatctacaaaaacatttcctgacttcttgctgaacctcttgcctctgggaaatactgctgtttgcttacttaaaaagtggtgagaaattaatatgattctctcttcccttttaaaaaattaaatttgtataaatataaggcgtacaagtgcagttttgttacacggatatattgcgaagtggtgaagtccaggcttttcctgcaaccaacaccagaaaagtgtacactgtacccatcaggtactttc

SEQ ID NO: 8699 - DNA, 104 bp, Homo sapiens
  unsure (13): n=A,T,C or G
  unsure (34): n=A,T,C or G
  unsure (35): n=A,T,C or G
  unsure (42): n=A,T,C or G
  unsure (45): n=A,T,C or G
  unsure (50): n=A,T,C or G
  unsure (61): n=A,T,C or G
  unsure (76): n=A,T,C or G
  unsure (79): n=A,T,C or G
  unsure (80): n=A,T,C or G
  unsure (90): n=A,T,C or G
ctgtggactccancatgtttctgataattatgcnngcaacanttntgtancctcaagtaanaccacctgtgaactngannattatctggnccaaatatgaagat

SEQ ID NO: 8700 - DNA, 622 bp, Homo sapiens
  unsure (554): n=A,T,C or G
tccttttatattcccagaagtgggtttgctggatcatatggtaattctatttttagttttttgaggaacctctataccattttccatggtggctgtactaatttacattcccagcaacggtgtagaagagttcacttttctctgcattgttgctaacactgatctttcatctatttgagaaaatgcattctagcaggtgtgaggtaatctcattgtggttttaatttgcatttccctaatggctagtgctgctgaacgttgtttgcatgaacctggtatgtcttcttttgagaagcattttcacaagccattggtgaagtatgtggctcaccaccacccatactccagccctgttcccagtcactggtacctagagggtgagagtgaggctgctcatcaacgtgttctccaagtcataagctgctgctctcccactcacgatgcttggtgattcagtgatgttttccacttaaagacagtgatagctgtatcaccacagttaatagatgtctgatgtgtcccagtcacagagataatacaaatgtgaggaaatnatgctggtgcctgaaagcattggagaccatttgtaagaatgccatttggtagttaaagtgaacatgaa

SEQ ID NO: 8701 - DNA, 470 bp, Homo sapiens
ctgccccatacctggcaggatccagagggtgggccctgatggacaccagtctatcaggtcctccctgcaagatgctacagagtccttctccctcaacacatgtttggtgagcttggcacctacatgacacccggcttggagcactcgctgttcgtttcaaagtaactctccaggagtgaacacgggatgcttcgtggggtgtaggagatgcagcagtcagcactagtagcatggaatcctgcagcatgagaaagggtcatctgaggaccaatctttctcctccagagcatgtccagaagtactggattttccaatggaagctttgacatcatgaactctgtctctgcatcttttgtgacccgggcctgggatccaagggcagtaacaagcatgaggcaggagagggcagccacggagaccttcatcctcctggtgggcaggcagggctggccgaggactcctgggctcac

SEQ ID NO: 8702 - DNA, 547 bp, Homo sapiens
  unsure (11): n=A,T,C or G
  unsure (17): n=A,T,C or G
  unsure (44): n=A,T,C or G
  unsure (179): n=A,T,C or G
  unsure (456): n=A,T,C or G
  unsure (497): n=A,T,C or G
gcaccctccgnttcctntcctaggcgacgagacccagtggctanaagttcaccatgtctattctcaagatccatgccagggagatctttgactctcgcgggaatcccactgttgaggttgatctcttcacctcaaaaggtctcttcagagctgctgtgcccagtggtgcttcaactggnatctatgaggccctagagctccgggacaatgataagactcgctatatggggaagggtgtctcaaaggctgttgagcacatcaataaaactattgcgcctgccctggttagcaagaaactgaacgtcacagaacaagagaagattgacaaactgatgatcgagatggatggaacagaaaataaatctaagtttggtgcgaacgccattctgggggtgtcccttgccgtctgcaaagctggtgccgttgagaagggggtccccctgtaccgccacatcnctgacttggctggcaactctgaagtcatcctgccagtcccngcgttcaatgtcatcaatggcggttctcatgctggcaacaagctggacct

SEQ ID NO: 8703 - DNA, 639 bp, Homo sapiens
ctgtctgtactagacaaggttaccaagtgcggaattggttaatactaacagagagatttgctccattctctttggaataacaggacatgctgtatagatacaggcagtaggtttgctctgtacccatgtgtacagcctacccatgcagggactgggattcgaggacttccaggcgcatagggtagaaccaaatgatagggtaggagcatgtgttctttagggccttgtaaggctgtttccttttgcatctggaactgactatataattgtcttcaatgaagactaattcaattttgcatatagaggagccaaagagagatttcagctctgtatttgtggtatcagtttggaaaaaaaaaatctgatactccatttgattattgtaaatatttgatcttgaatcacttgacagtgtttgtttgaattgtgtttgttttttcctttgatgggcttaaaagaaattatccaaagggagaaagagcagtatgccacttcttaaaacagaacaaaacaaaaaaagaaaattgtgctcttttctaatccaaagggtatatttgcagcatgcttgactttaccaattctgatgacatctttacggacactattatcactaagaccttgttatggcgaagtctttag

SEQ ID NO: 8704 - DNA, 586 bp, Homo sapiens
  unsure (8): n=A,T,C or G
  unsure (549): n=A,T,C or G
  unsure (560): n=A,T,C or G
  unsure (563): n=A,T,C or G
caactgancgagtatctagatgccatgatgaatgaggctccaggccccatcaatttcaccatgttcctcaccatgtttggtgagaagttaaatggcacagatcctgaagatgtcatcagaaatgcctttgcttgctttgatgaagaagcaactggcaccatacaggaagattacttgagagagctgctgacaaccatgggggatcggtttacagatgaggaagtggatgagctgtacagagaagcacctattgataaaaaggggaatttcaattacatcgagttcacacgcatcctgaaacatggagccaaagacaaagatgactgaaataacttcaaattccagccaaacgttccttgttgccactttgggtattctgagattttctcttgcatgcccttagctttacagcttttgcatttcctgttgtatttattctcagccattttgggcatatgtatctttataatcagactggaaacgggactttctattaatatcattttcagaataaaaaataggataatttaacctaccagcccttctccnccaataactgnggnctatacagagtcaatatattttt

SEQ ID NO: 8705 - DNA, 386 bp, Homo sapiens
  unsure (29): n=A,T,C or G
  unsure (36): n=A,T,C or G
cctatagaatagtgctcaagtatacggtntgctctnaaaaaaatgttagctgtggtttttattgtcttattataattagtaattctttcaaattaataatataagcttttacacacatatcataaaagttattaaaattattagagatattttgagtagtgacgctgaagaaagtaaaagtggaattcctaagtcatacttgaaagtatcaattatatttatagaagatcagtcctactttcaaccaccaagccagcaagaattgaaaaccaactggtcaacatatgtcgatgcagatggaaaaaggatacaactgtctttaaattccctaaagaaagctgagtggagagccttctggtcactgcagtccaacctatcattacgcg

SEQ ID NO: 8706 - DNA, 473 bp, Homo sapiens
ccagtggaatgatgttccctgcaattaccatctcacctatacgtgcaagaaaggaacagttgcttgcggccagccccctgttgtagaaaatgccaagacctttggaaagatgaaacctcgttatgaaatcaactccctgattagataccactgcaaagatggtttcattcaacgtcaccttccaactatccggtgcttaggaaatggaagatgggctatacctaaaattacctgcatgaacccatctgcataccaaaggacttattctatgaaatactttaaaaattcctcatcagcaaaggacaattcaataaatacatccaaacatgatcatcgttggagccggaggtggcaggagtcgaggcgctgatccctaaaatggcgaacatgtgttttcatcatttcagccaaagtcctaacttcctgtgcctttcctatcacctcgagaagtaattatcagttggtttggattt

SEQ ID NO: 8707 - DNA, 402 bp, Homo sapiens
ccaggctggtctcaaactcctggcctctagtgatctgcctgcctcggtctcccaaagtgggattacaggcatgaaccaccacgtccagccagtcattttcttaagtaggttcttcccagcctgcaaacccagtgaaagggcttattctttccccattactgtggggaaaaagtcctgtagaggctttccataggccctgtgtgactcacgtgtctatacctgaatcaactgttacaaccaagcagatgcagagactgcgtgccctctcctggagctaggagctaggtgagtcaatcctgcactttctctacaaggcttgcaaaggtgagcaagaagattccccaaagtgaaatcagggtgctgttaccaaaagaagctatgctggcaggcaaaaaacaacag

SEQ ID NO: 8708 - DNA, 481 bp, Homo sapiens
  unsure (18): n=A,T,C or G
  unsure (86): n=A,T,C or G
  unsure (93): n=A,T,C or G
  unsure (142): n=A,T,C or G
  unsure (161): n=A,T,C or G
  unsure (165): n=A,T,C or G
  unsure (173): n=A,T,C or G
  unsure (179): n=A,T,C or G
  unsure (193): n=A,T,C or G
  unsure (195): n=A,T,C or G
  unsure (213): n=A,T,C or G
  unsure (219): n=A,T,C or G
  unsure (249): n=A,T,C or G
  unsure (252): n=A,T,C or G
  unsure (258): n=A,T,C or G
  unsure (272): n=A,T,C or G
  unsure (291): n=A,T,C or G
  unsure (300): n=A,T,C or G
  unsure (306): n=A,T,C or G
  unsure (342): n=A,T,C or G
  unsure (353): n=A,T,C or G
  unsure (354): n=A,T,C or G
  unsure (405): n=A,T,C or G
  unsure (454): n=A,T,C or G
tgaggactgacctttttncaaagacgagaatccaggacttgaatcgtatcttcccactttctgaggactactctggatcaggcttnggctccngctccggctctggatcaggatctgggagtggcttcctaacggaaatggnacaggattaccaactagtngacnaaagtgangctttncatgacaaccttangnctcttgacaggaatctgncctcanacagccaggacttgggtcaacatggattanaanaggatnttatgttataaaanaggattttcccaccttganaccaggcantgtagntagcatattttatgtaccatggttatatgattaatnttgggacaaannattttatagaaatttttaaacatctgaaaaagaagcttaagttttatcatncttttttttctcatgaattcttaaaggattatgctttaatgctgttatntatcttattgttcttgaaaatacctgc

SEQ ID NO: 8709 - DNA, 589 bp, Homo sapiens
  unsure (183): n=A,T,C or G
  unsure (193): n=A,T,C or G
  unsure (194): n=A,T,C or G
  unsure (200): n=A,T,C or G
  unsure (213): n=A,T,C or G
  unsure (233): n=A,T,C or G
  unsure (246): n=A,T,C or G
  unsure (248): n=A,T,C or G
  unsure (265): n=A,T,C or G
  unsure (281): n=A,T,C or G
  unsure (289): n=A,T,C or G
  unsure (331): n=A,T,C or G
  unsure (378): n=A,T,C or G
  unsure (382): n=A,T,C or G
  unsure (386): n=A,T,C or G
  unsure (394): n=A,T,C or G
  unsure (396): n=A,T,C or G
  unsure (406): n=A,T,C or G
  unsure (440): n=A,T,C or G
  unsure (448): n=A,T,C or G
  unsure (458): n=A,T,C or G
  unsure (463): n=A,T,C or G
cctggccaacaacaccgttattgctaaagtaaataatgttgtgtgggacctggaccgccctctggaagaagattgtaccttggagcttctcaagtttgaggatgaggaagctcaggcagtgtattggcactctagtgctcacataatgggtgaagccatggaaagagtctatggtggatgttnatgctacggnncgccantagaaaatggatnctattatgacatgtacctcnaagaagggggtgngnctagcaatgatttctcntctctggaggctttgngtaagaanatcattaaagaaaaacaagcttttgaaagactggaagttaanaaagaaactttactggcaatgtttaagtacaacaagttcaaatgccngatnttgnatgaaaangngaatactccnactaccacagtctatagatgtggccctttgatanatctgtgncgggatcctnatgtnagacacacgggcaaaattaaggctttaaaaatacacaaaaattcctccacgtactgggaaggcaaagcagatatggagactctccagagaatttatggcatttcattcccagatcctaaaatgttg

SEQ ID NO: 8710 - DNA, 567 bp, Homo sapiens
  unsure (561): n=A,T,C or G
  unsure (562): n=A,T,C or G
tgggagagctagactaagttggtcatgatgcagaagctactcaaatgcagtcggcttgtcctggctcttgccctcatcctggttctggaatcctcagttcaaggttatcctacgcagagagccaggtaccaatgggtgcgctgcaatccagacagtaattctgcaaactgccttgaagaaaaaggaccaatgttcgaactacttccaggtgaatccaacaagatcccccgtctgaggactgacctttttccaaagacgagaatccaggacttgaatcgtatcttcccactttctgaggactactctggatcaggcttcggctccggctccggctctggatcaggatctgggagtggcttcctaacggaaatggaacaggattaccaactagtagacgaaagtgatgctttccatgacaaccttaggtctcttgacaggaatctgccctcagacagccaggacttgggtcaacatggattagaagaggattttatgttataaaagaggattttcccaccttgacaccaggcaatgtagttagcatattttatgtaccatggnnatatg

SEQ ID NO: 8711 - DNA, 279 bp, Homo sapiens
  unsure (42): n=A,T,C or G
  unsure (104): n=A,T,C or G
  unsure (264): n=A,T,C or G
gggcattggtgtagacaacaggaaagtccaggctatagccgnactcaaaaacctttctgttccctttctgccagccctagggattgagtccacattcagcacangactctctgggtacagctctctttaggaagacacaaattgcatggtgaagtcagttatatcctggccgcctttggtccctcccaggaagacgggcatgttttctgcttgagaggtgctgatgtaccagttggggaactgggcagactcaaattccagctngttattgatttctat

SEQ ID NO: 8712 - DNA, 477 bp, Homo sapiens
gcgcctataatcccagctactggggaggctgaggcaggagaatcacttgaacccgggggacagaggttgtagtgagccaagatcgcaccactgcactccagcctgggtcacagagtgagactccatctcaaaaaaaaaaagagagagagagagaaagaaatagaagagaagagccatcttggcagggttattttatatctgagcaaggagtttaaatgagactagtttagattgtctgctgatgcagccgtccatagcagtacccctaaaatcccaccagaatacgggtccctctaacccagtggctggaagaaccactgtctagagcaacttttcttggaactgtcccagctaccaagtcagacaccaaggtttatgccaccaggtaacacgggaatcacaggtacatgtcgctccggtcagattagttggctttggcccctcgaccctgtgcaggagctagttctcagcttgcag

SEQ ID NO: 8713 - DNA, 494 bp, Homo sapiens
ccttatttctcttgtcctttcgtacagggaggaatttgaagtagatagaaaccgacctggattactccggtctgaactcagatcacgtaggactttaatcgttgaacaaacgaacctttaatagcggctgcaccattgggatgtcctgatccaacatcgaggtcgtaaaccctattgttgatatggactctagaataggattgcgctgttatccctagggtaacttgttccgttggtcaagttattggatcaattgagtatagtagttcgctttgactggtgaagtcttagcatgtactgctcggaggttgggttctgctccgaggtcgccccaaccgaaatttttaatgcaggtttggtagtttaggacctgtgggtttgttaggtactgtttgcattaataaattaaagctccatagggtcttctcgtcttgctgtgttatgcccgcctcttcacgggcaggtcaatttcactggttaaaagtaagagacag

SEQ ID NO: 8714 - DNA, 605 bp, Homo sapiens
ccagcgacagcctggcctgggaatggactggcagctcatcactaaaatgactcctttcatggaatccactgttatgcagccacactgaccacagagcaactgaataggtgagcattggattgttgatgacaactcttcagcagaacaattgtgtgtttgaagggactgttttatgatgaaataactgttatttcctggagctaattgttgaatgacagtttgtcaactgtttaaatgaatttcatttgaattaacaattatacagccactcaggggtcctacattcgccagagttggcatccagttgatgggttcatttgaattaaatggtttggaggctaacgtgattttttaaattgaatttcatcactattctgtgtattctatttatcactattctaaatgactcatggttggctaattgattatcatgtaagcaagctatttgaagaaattgattacatatatttatatatagggggtaactaattaatgattacttgattaaattgctatgtgaactgacaactatttataaatcaatgcaatagactgttgtttgaccaaattattttactgaactgacaagtgggtttttgatttgt

SEQ ID NO: 8715 - DNA, 572 bp, Homo sapiens
cctgcctcagcctcccaagtagctgggactacaggcatatgccaccacgcccagctaatttttgtgtttttagtacagacagggtttcaccgtgttagccaggctgatcttttgatccgcccacctcagcctcccaaagtgccaggaccacaggcgtgagccactgaacttggccgggacagctatttgtaaactagctatgtgaaaataaagggccatatccttggagtctagaattctcctttcactaagttatcaaaaattatattactttgaccacacaaaggtatttatctctggttcgtgcaaacactgaatgttggaagtaccgagtgataattggaaataaaaatctccaaacgtctagtaataaaaagactgatgggctaaattgtgtatttattcatacagaagattattagcctgttaaaaaacagtgagattttgtatagcaagatcacgggtttttttaatgaaaaaaatatgcatacaggtgtgtgcacatacctatatatttacttttttccccctctcactctgtgcccaagctggagtgtagaagcacactcatg

SEQ ID NO: 8716 - DNA, 420 bp, Homo sapiens
ctgtgacgcctgaataactgtctactttatcttcactgaaccactcactctgtgtaaaggccaacagatttttaatgtggttttcatatcaaaagatcatgttgggattaacttgcctttttccccaaaaaataaactctcaggcaagcatttctttaaagctattaagggagtatatacttgagtacttattgaaatggacagtaataagcaaatgttcttataatgctacctgatttctatgaaatgtgtttgacaagccaaaattctaggatgtagaaatctggaaagttcatttcctgggattcacttctccagggattttttaaagttaatttgggaaattaacagcagttcactttattgtgagtctttgccacatttgactgaattgagctgtcatttgtacatttaaagcag

SEQ ID NO: 8717 - DNA, 594 bp, Homo sapiens
  unsure (555): n=A,T,C or G
ccatcggtgctgaaattgagcattttaaatagtacagtaggctggtatacattaggaaatggactgcactggaggcaaatagaaaactaaagaaattagataggctggaaatgcttactttctgctctcattttctttcattttgtctgctgtctttttgaatgccaatactttcatttaaaatgttttgggagcacggcaacccaaaatgactgaacggtggtccaaaaatccaaaccaactgataattacttctcgaggtgataggaaaggcacaggaagttaggactttggctgaaatgatgaaaacacatgttcgccattttagggatcagcgcctcgactcctgccacctccggctccaacgatgatcatgtttggatgtatttattgaattgtcctttgctgatgaggaatttttaaagtatttcatagaataagtcctttggtatgcagatgggttcatgcaggtaattttaggtatagcccatcttccatttcctaagcaccggatagttggaaggtgacgttgaatgaaaccatctttgcagtggnatctaatcagggagttgatttcataacgagggttcatct

SEQ ID NO: 8718 - DNA, 608 bp, Homo sapiens
  unsure (553): n=A,T,C or G
cctccggtcacggttaaagccaagctgaggcttccactgccgtccattgctggatttttcccagtcactaggtttcagtactgctgctggctttcttgctcctggaagcattacagctttaaaaatgtaatcttcagcaaactgtgggtctttaaaattaatactgactacagtgttctgtgtcagatcccttaacataggaacaggagaacatactatttgatctggaagaatggcttcttcatccaaagaaaactttccttgaatcccatgacatagttcagggggtacctccactggctctgtggaacctgtctggtacagctctaaaatgaagtcatggagtgggtgatgtttccccacaaataagacatcacctccaaggctgtttcttctggtctcttctggagtgaggtctgggtatacctcttctagggcagctcgtagccttcgctcatccacgaatggcaagagagcaacaccttgccatgcatatttcttcccattcaaatcaatagcaaaatcttcaggatagaagtcaattatactagantcaggatcactcatgagcttccgccatgatggaggtagaaaattaccacttgcag

SEQ ID NO: 8719 - DNA, 517 bp, Homo sapiens
ctgtcctggcttggatacagctctggagtggtcaaaagagcgctctgtccctaatcatcaactctgctccaaaaaggaacctgaaaaaagctctaaactcacagatccaagaagcccagacattcccattgctgtcttcgaatgggattctaaagccagggggatgatgttttagggaatccttgaaactcctacaattataaacaggtgtgcatgaagaaaatacactaccatttaatgtcccaaacgccttataaggaaggtgaaggggacctagaaagccccttaagttcgcttagcatctcagtaagtggtctgagcatggaacagagtttgggagttgaagcaggagagacctgggttacactacaggtaaagaacatgggattttgaggcaactggggattaggaggtaaaaggaaaaggtgggagggggaagagtagaaccagtgaggtgctgtgaggctggagaccctgggaggtgaagcaggcaaggaagagtcccatgtcggggtgg

SEQ ID NO: 8720 - DNA, 454 bp, Homo sapiens; identical to SEQ ID NO: 8124

SEQ ID NO: 8721 - DNA, 456 bp, Homo sapiens
ctgaaaagaggacccaaaaagaaattggagatattgctggtgttgctgatgttacaatcagacagtcctatagactgatctatcctcgagccccagatctgtttcctacagacttcaaatttgacaccccagtggacaaactaccacagctataaattgaggcagctaacgtcaaattcttgaatacaaaactttgcctgttgtacatagcctatacaaaatgctgggttgagcctttcatgaggaaaaacaaaagacatggtacgcattccagggctgaatactattgcttggcattctgtatgtatatactagtgaaacatatttaatgatttaaatttcttatcaaatttcttttgtagcaatctaggaaactgtattttggaagatatttgaaattatgtaattcttgaataaaacatttttcaaaactgaaaaaaaaaaaaaaaaaaaaaa

SEQ ID NO: 8722 - DNA, 442 bp, Homo sapiens
  unsure (124): n=A,T,C or G
  unsure (215): n=A,T,C or G
  unsure (317): n=A,T,C or G
  unsure (357): n=A,T,C or G
ctgtggccctgctcggattgagtatgcttgataggctttgggataagaagggacaaggtgcttctagccctgtctcagtccgttatcactctgctgtagaagggggacatgccacatgtattanaaggcatctgctgtaacttccagtgcaagataattcaataactgatgtcccatttcattcagagcccttattgctcttatcaaaacagaanaaggctacatttgtgggagtgttgtcatattctcaggccaactgttttgaaattcggtatctcactgagctaatctggaacaaacctctcacctcaggccanaaggggatgacctccatttgcttctctgagtagtttcctntgctgacattccaaatcccaccatcgattgtgcagcgctttggatttccttcagttctccaggtccacctggaaagtatagttgg

SEQ ID NO: 8723 - DNA, 545 bp, Homo sapiens
  unsure (458): n=A,T,C or G
cccccgtctgaggactgacctttttccaaagacgagaatccaggacttgaatcgtatcttcccactttctgaggactactctggatcaggcttcggctccggctccggctctggatcaggatctgggagtggcttcctaacggaaatggaacaggattaccaactagtagacgaaagtgatgctttccatgacaaccttaggtctcttgacaggaatctgccctcagacagccaggacttgggtcaacatggattagaagaggattttatgttataaaagaggattttcccaccttgacaccaggcaatgtagttagcatattttatgtaccatggttatatgattaatcttgggacaaagaattttatagaaatttttaaacatctgaaaaagaagcttaagttttatcatccttttttttctcatgaattcttaaaggattatgctttaatgctgntatctatcttattgttcttgaaaatacctgcattttttggtatcatgttcaaccaacatcattatgaaattaattagattcccatgg

SEQ ID NO: 8724 - DNA, 449 bp, Homo sapiens
  unsure (12): n=A,T,C or G
  unsure (39): n=A,T,C or G
  unsure (69): n=A,T,C or G
  unsure (106): n=A,T,C or G
  unsure (123): n=A,T,C or G
  unsure (131): n=A,T,C or G
  unsure (177): n=A,T,C or G
  unsure (195): n=A,T,C or G
  unsure (211): n=A,T,C or G
  unsure (235): n=A,T,C or G
  unsure (302): n=A,T,C or G
  unsure (308): n=A,T,C or G
  unsure (351): n=A,T,C or G
  unsure (402): n=A,T,C or G
  unsure (403): n=A,T,C or G
ctggagagtgtngatcccaaaaattacccaaagaagaanatggaaaagcgatttgtcttcaacaagatngaaatcaataacaagctggaatttgagtctgcccagntccccaactggtacatnagcacctntcaagcagaaaacatgcccgtcttcctgggagggaccaaaggcggncaggatataactgacttnaccatgcaatttgtgncttcctaaagagagctgtacccanagagtcctgtgctgaatgtggactcaatccctagggctggcagaaagggaacagaaaggtttttgantacggntatagcctggactttcctgttgtctacaccaatgcccaactgnctgccttagggtagtgctaagaggatctcctgtccatcagccaggacagtnngctctctcctttcagggccaatccccagcccttttgttgagccagg

SEQ ID NO: 8725 - DNA, 246 bp, Homo sapiens
gacaccgggtgtagagggcggtcgcggcgggcagtggcggcagaatgttggctaccagggtatttagcctagttggcaagcgagcaatttccacctctgtgtgtgtacgagctcatgaaagtgttgtgaagagcgaagacttttcgctcccagcttatatggatcggcgtgaccaccccttgccggaggtggcccatgtcaagcacctgtctgccagccagaaggcactgaaggagaaggagaagg

SEQ ID NO: 8726 - DNA, 568 bp, Homo sapiens
ccagtggaatgatgttccctgcaattaccatctcacctatacgtgcaagaaaggaacagtcgcttgcggccagccccctgttgtagaaaatgccaagacctttggaaagatgaaacctcgttatgaaatcaactccctgattagataccactgcaaagatggtttcattcaacgtcaccttccaactatccggtgcttaggaaatggaagatgggctatacctaaaattacctgcatgaacccatctgcataccaaaggacttattctatgaaatactttaaaaattcctcatcagcaaaggacaattcaataaatacatccaaacatgatcatcgttggagccggaggtggcaggagtcgaggcgctgatccctaaaatggcgaacatgtgttttcatcatttcagccaaagtcctaacttcctgtgcctttcctatcacctcgagaagtaattatcagttggtttggatttttggaccaccgttcagtcattttgggttgccgtgctcccaaaacattttaaatgaaagtattggcattcaaaaagacagcagacaaaatgaaaga

SEQ ID NO: 8727 - DNA, 352 bp, Homo sapiens
ggagaggtaaaaatgttgtacatcagctctcagtaaccctagaagacttatataatggtgcaacaagaaaactggctctgcaaaagaatgtgatttgtgacaaatgtgaaggtagaggaggtaagaaaggagcagtagagtgctgtcccaattgccgaggtactggaatgcaaataagaattcatcagataggacctggaatggttcagcaaattcagtctgtgtgcatggagtgccagggccatggggagcggatcagtcctaaagatagatgtaaaagctgcaacggaaggaagatagttcgagagaagaaaattttagaagttcatattgacaaaggcatgaaagatgg

SEQ ID NO: 8728 - DNA, 392 bp, Homo sapiens
ccttggatgcagatcaatgctccaataaagttcattatcagctcctcctgccttgtgacaggatgatttgattttacaaaagtccctttgaaaacaagagtaaacgcagacagcttctagagaaaagtctggtgaagcagcagttgataatagattttcttttagtgatgaaattaatcttgttttggtaatctacagcctgttagggataggtggagggatgaagtccttaaaactaaattgttcctctacgaatcttcgacctgagcctgcggagagagtagccccaaatccatctctctgctgaaaggtcgcctgttttggtaggtgtgaggacattccgaaacacggccatccacattctgatacatcgcttcttctgcatctgtcag

SEQ ID NO: 8729 - DNA, 608 bp, Homo sapiens
  unsure (563): n=A,T,C or G
gctgggagagctagactaagttggtcatgatgcagaagctactcaaatgcagtcggcttgtcctggctcttgccctcatcctggttctggaatcctcagttcaaggttatcctacgcagagagccaggtaccaatgggtgcgctgcaatccagacagtaattctgcaaactgccttgaagaaaaaggaccaatgttcgaactacttccaggtgaatccaacaagatcccccgtctgaggactgacctttttccaaagacgagaatccaggacttgaatcgtatcttcccactttctgaggactactctggatcaggcttcggctccggctccggctctggatcaggatctgggagtggcttcctaacggaaatggaacaggattaccaactagtagacgaaagtgatgctttccatgacaaccttaggtctcttgacaggaatctgccctcagacagccaggacttgggtcaacatggattagaagaggattttatgttataaaagaggattttcccaccttgacaccaggcaatgtagttagcatattttatgtaccatggntatatgattaatcttgggacaaagaattttatagaaatttttaaa

SEQ ID NO: 8730 - DNA, 600 bp, Homo sapiens
gatcacctgaggtcaggagttcaagaccagcctgaccgacatggtagaaccccgtctctattaaaaatacaaaaaattagctgggtgtggtggtgcatgcctgtaatcccagctacctgggaggctgaggtataagaattgcttgaacctgggaggtagaggttgcagtgagctgataccgtaccattgcactccagcctgatcaaccagagcgaaaatccatcaaaaaagaaaaaaaaaggaaggaaggaagggagggagggaaagaaggaaagaaggaaggaaggaaggaagaaaaaagtggggcaaggcagcaagaagatgctgacttgttttcagcaatcatcagttatgattacttctcttcttttaccaaaaacttggacctccagcttcctgtaaacctttatcccagctcttactggtagacatgcagtgaagccagagggaataacaagtacccagcacttgaaaaacactttcagtcaagcatggtggcacatctgtagtccccgctacttgggaggctgaggtaggacgatcacttgagcccagagttcgaggctgcgatgagctatgattgcacctgtgaatagccat

SEQ ID NO: 8731 - DNA, 604 bp, Homo sapiens
ctgcacatggattggttaacataatatatactgctatataatcttttaagggctaatatttgtagataatttaaaagcatgtcaatttcctctaagatttgattatttaacctgcacaaaggccaatcttcagttatcaatgacaagaaaactctagggctgccaaaataacttcattttagaccccagagttagtgttaggctggtaatgtttctaatttgggaataatgagactagaaagctaggagggccccctccaaatttctcccttgtattaggctgaagtagaacataacgtggcttaaagcataaacttaaagcatatgctttgagttttaaaaatgttaacctgtaattaattattagagtattatccatagtctactatgatagtcagttaatattctctaaatcagattatattcatttgaaaatgcatctgcatatttgcaaatgtgttattacacaagatcttacctatgtcaatttaaagaggttaaagatgcaggaagcccccactaaaatgtaaacacatttgtacggttttcagaatgtttggactcattctttcccattgacagagcagtaggttttaattagagt

SEQ ID NO: 8732 - DNA, 604 bp, Homo sapiens
cctagatcattcatattgtacattgacatttttacataaatggaattaatactacttaccatttgagtaaagaacacaaggaattgaagagtctgtgaaaatatgtcctgtttgtgaaaggtgaaactgtccaatccatgtccaatcaatgtcagtcgtccagtattggtggtgattattaaacttattggaggtacaactttacctccaataagcttacctttacaagcttctgctttccctgcttcatctctgttatgggctatcagtccagcttggtgtgaaaatgagactatatctataccacagcccccaatcctttcaaaggctttgcatgtatttcagctacaagtgacaaggatattaaggatttaaaaggataagagagtgggaaagatgtataaggaagtgcctttgtcaaaaggcagcaaaaagtataatgatataaacataatatgaaataagcaaattttagaatactttgaaacagatttatagaggaatacatagtaaatagttatagacacacatttggggcatttttaataaggttagcaagaagaaatttgcatgagtaatgagcaatgtgaaatgggcattatac

SEQ ID NO: 8733 - DNA, 563 bp, Homo sapiens
ctgcgcaaggagtcccagaaagaccgcaagaacccgctgccccccagcgttggcgtggttgacaagaaagaggagacgcagccgcccgtggcgcttaagaaagaaggaataagacgagttggaagaagacctgatcaacaacttcagggtgaagggaaaataattgatagaagaccagaaaggcgaccacctcgtgaacgaagattcgaaaagccacttgaagaaaagggtgaaggaggcgaattttcagttgatagaccgattattgaccgacctattcgaggtcgtggtggtcttggaagaggtcgagggggccgtggacgtggaatgggccgaggagatggatttgattctcgtggcaaacgtgaatttgataggcatagtggaagtgatagatcttctttttcacattacagtggcctgaagcacgaggacaaacgtggaggtagcggatctcacaactggggaactgtcaaagacgaattaactgacttggatcaatcaaatgtgactgaggaaacacctgaaggtgaagaacatcatccagtggcagacactgaaaa

SEQ ID NO: 8734 - DNA, 600 bp, Homo sapiens
ctggctccagggatggtacaacagatgcagtctgtgtgctctgattgtaatggagaaggagaggtaattaatgaaaaagaccgctgtaaaaaatgtgaagggaagaaggtgattaaagaagtcaagattcttgaagtccacgtagacaaaggcatgaaacatggacagagaattacattcactggggaagcagaccaggccccaggagtggaacccggagacattgttcttttgctacaggagaaagaacatgaggtatttcagagagatgggaatgatttgcacatgacatataaaataggacttgttgaagctctatgtggatttcagttcacatttaagcaccttgatggacgtcagattgtggtgaaatacccccctggcaaagtaattgaaccagggtgtgttcgtgtagttcgaggtgaagggatgccgcagtatcgtaatccctttgaaaaaggtgatctttacataaagtttgatgtgcagtttcctgaaaacaactggatcaacccagacaagctttctgaactagaagatcttctgccatctagaccggaagttcctaacataattggagaaacagaggaggtagagctt

SEQ ID NO: 8735 - DNA, 594 bp, Homo sapiens
cctacctgcaagaggaattgaagattaaacgttctctcttcaactaccatgacacgaggatccatgcctgcctctactttattgcccctactggacattcactaaagtccctggatctggtcaccatgaaaaagctggacagtaaggtgaacatcattccaataattgcaaaagctgacaccattgccaagaatgaactgcacaaattcaagagtaagatcatgagtgaactggtcagcaatggggtccagatatatcagtttcccactgatgaagaaacggtggcagagattaacgcaacaatgagtgtccatctcccatttgcagtggttgacagcaccgaagaggtgaagattggcaacaagatggcaaaggccaggcagtacccctggggtgtggtgcaggttgagaatgaaaatcattgcgattttgtgaaacttcgagagatgctgatccgcgtgaacatggaggacttgcgagagcagactcacacccgccactatgaattgtaccgacgctgtaagcttgaagagatggggttcaaggacactgaccctgacagcaaacccttcagtcttcaggagacatatgaag

SEQ ID NO: 8736 - DNA, 600 bp, Homo sapiens
cttgtaactatcaaaatgaatagttcatttttgatagatttgttgtgcagccattatgaattaaatggtttattaggagtttgactaaatttttatttttagtgtgtatagcatgaatactaccaaaggagacgacaaacttgcagcttaaaatgggcaccagttcccacactggcttaatttatataactgcttggctgtattgcgggtaataatattagaagcaagaagcacttcatttttaaaagagatgttactataatattgcttaaatgctttagcacttggacttcttgagatgcagatgtgtgatttggagtgctggcttatttaaaggtcaagccaaggagtttgtggttcagccacaactactgttttctaagactattgatgtgaaggacttagtgaagtaatttttatattctgggcttcccagcaagatgtcctttttatgactgccatgcttcttttggactcagtaaatatttgtaatgttagaaaagtctcattatttttataaaatgcatgacattttaagtatgtgttgcataaaatggattatagcagttctcatggtttaggatttttaagaaatagtcc

SEQ ID NO: 8737 - DNA, 329 bp, Homo sapiens
  unsure (6): n=A,T,C or G
  unsure (7): n=A,T,C or G
  unsure (41): n=A,T,C or G
  unsure (44): n=A,T,C or G
  unsure (45): n=A,T,C or G
  unsure (56): n=A,T,C or G
  unsure (63): n=A,T,C or G
  unsure (67): n=A,T,C or G
  unsure (68): n=A,T,C or G
  unsure (304): n=A,T,C or G
gcccannacctctgcaaggtctgctcgttactatgcatgangtnngctatgatggnggcacanctgnngctgataccaatgaagtgacacatgtggcgtaagaagggaagaatctgggcttccggggaatcttctatccggatgtgcagaagcttgtcagcatcgcctgcaaaaaagggccctgtatccatggagacattgacatgggctttgattttcaagtccttctgaatcttggggtcacaggcttgactgaaattgccaacgaagaccttccctggcacgatttcaatggggtatggcntgaaatgcatccagttcctgaggca

SEQ ID NO: 8738 - DNA, 607 bp, Homo sapiens
ctgataatttacaatgtcataaagtttccagtttcacaatacaaaaaggataaaatgaaattgggtatcattttgttgcaatttatagaactttacccatacctgtaagaccctcaatgtatatgaaatcattttcactgggaaagtgacagttacagtaaaagcagaaccacacaaatctttatttaaaagccgaaatatcagccttctctctctcttttgctatttgaaaggtagtcttcaatttggcaggcaactgcttctctctccaaatagtaacaggttacaaacatgctactttaaatatgaataggacctaaggctttagtattttaaatcttgcccaatacagaaatgcctttcaagagactttagtgatgcttaatttatgaacaacaaggaattattttccttttgattattcactttttcaaaactcatagatcagaataaacaaaaaatcccccaacccatggtggggacacaaaagtaacataagtgactaaggtgtgccattcatagagaggttgaagactccatgccccaggaccacttagctgcaatagggtgaaatagtctactttttgatttcatgaatttttttcta

SEQ ID NO: 8739 - DNA, 279 bp, Homo sapiens
  unsure (58): n=A,T,C or G
  unsure (66): n=A,T,C or G
  unsure (79): n=A,T,C or G
  unsure (119): n=A,T,C or G
  unsure (131): n=A,T,C or G
  unsure (202): n=A,T,C or G
  unsure (222): n=A,T,C or G
  unsure (234): n=A,T,C or G
  unsure (243): n=A,T,C or G
  unsure (267): n=A,T,C or G
tttttttttttttttttttttttactcataaaaaacattttactttaattatagggtncaaataanagtcttaacacanaaatcctacctcctatttaagatataaatacttgatgatntaatcaatcaanagggattaattaatgtcagttgaaaatctaatgacttaaatccataaatgccatttgcttttgtctggaanatttaaactgatttaagggngacacacagcanagttctagnggacattcgtgttaaccgtttggngctcaaaatgga

SEQ ID NO: 8740 - DNA, 605 bp, Homo sapiens
ctgtggctgtctgtcagagaagcacatttttctgcagataattagaatggcttcccccatctctcacggactgtcccaagtctagaaaagaattgagttcctcttctattagtcaaataaaagggaagagaatgtttgtcttcctttcctttctgtagtgttaagaaaataaacgaacttaatgattctaaattatcagtgagcttaacactgtactatagaccaaagattaccttttcaaaaagtcctttgaggtgaaatattttgtatacgtaatacatagatgcacatataaacacacacatatagaatctcaatattttaacacttctttgggtagttgtactaactcactaaccctgaggaaaaagttaagaaattgaaagtgttttcttcaaaagttgagatttaacaataaaaggtgttactttgataactaaaaggaactttattatcctcttcctaaaataaaccaatgcctattctgaaaatggcacttgcaattacaatttgccattatcaaagctaccactgaggtagaggcattatctaaaacaaataccacttatcatttattggcagttacctcgagagagacccataca

SEQ ID NO: 8741 - DNA, 596 bp, Homo sapiens
  unsure (562): n=A,T,C or G
ctgggagagctagactaagttggtcatgatgcagaagctactcaaatgcagtcggcttgtcctggctcttgccctcatcctggttctggaatcctcagttcaaggttatcctacgcagagagccaggtaccaatgggtgcgctgcaatccagacagtaattctgcaaactgccttgaagaaaaaggaccaatgttcgaactacttccaggtgaatccaacaagatcccccgtctgaggactgacctttttccaaagacgagaatccaggacttgaatcgtatcttcccactttctgaggactactctggatcaggcttcggctccggctccggctctggatcaggatctgggagtggcttcctaacggaaatggaacaggattaccaactagtagacgaaagtgatgctttccatgacaaccttaggtctcttgacaggaatctgccctcagacagccaggacttgggtcaacatggattagaagaggattttatgttataaaagaggattttcccaccttgacaccaggcaatgtagttagcatattttatgtaccatggntatatgattaatcttgggacaaagaattttatag

SEQ ID NO: 8742 - DNA, 596 bp, Homo sapiens
ctgaaagtttttgaaacaaatatttgaaaaccaggtatccacacatagcacttttattcctgactagttttgcacacttgaaaattgtttacttattttacaactgttttactgatgctatctttattgtttttgccgtattctgacatgtcaaatctatgccttgaattatatcatctcttttcctgtgggtttcatttgttaaattcattggattttaataatataaaagtatagctaattgttcagttttaactatttttaattatcttcttaacaaataagaagttgctttaaacattaaccaattttctatatttagctatacagagtaattgaacttaacatgtttttgtcaacaccaattacattttcagcttttaaaaatggtagcttttgtgaaatagaatcagtgaccagtatagcacttagatcccttctaactcatataatttttctcagccaatccattcacaagcttggcattgacatgtgctgctagtttataaactggcattgacgaaaatcatttgaatctcttctgctgagataatttgccaatgcaaaatacagttgtcattaatcctgcacattag

SEQ ID NO: 8743 - DNA, 601 bp, Homo sapiens
cctgtttgattgtagctatgttggtgtatctcgtgtacaagatggaaaagtgcttttgttgttctacctgatccagttgggggagcaggaatagggggtgcctgcctaacggcctctagcccatgtgcttatactgggatctgtcccgagggatctgcacctggttggcagtcattttgtggtggacgtggtaaatcgcgagtgttaccatgatgacgaggcccaagatgagccccaaaatcaggggcaaggtttcttccagttgctcccgctcatccactgggcatttatgctcttcactgaagacaaaatctgagataatgtcaaaaggttggatgtggaccgcagacaggatcatggtgaccgtcttctgcggatcactagaggccagtgaaatggtttgttgagcttgacactcataggacttcccagcgggggtgaccaaggcagagaggtggtgcgagttggctgtgtgcttcccagcactgactgcgtctttgaagtgggttttctccgaggagtcgtagacaaactgcactttgctcagcctccaagtcgcctcaggtcccttggacatgttgtggctttcctttacaaagag

SEQ ID NO: 8744 - DNA, 488 bp, Homo sapiens
cctactatgggtgttaaattttttactctctctacaaggttttttcctagtgtccaaagagctgttcctctttggactaacagttaaatttacaaggggatttagagggttctgtgggcaaatttaaagttgaactaagattctatcttggacaaccagctatcaccaggctcggtaggtttgtcgcctctacctataaatcttcccactattttgctacatagacgggtgtgctcttttagctgttcttaggtagctcgtctggtttcgggggtcttagctttggctctccttgcaaagttatttctagttaattcattatgcagaaggtataggggttagtccttgctatattatgcttggttataatttttcatctttcccttgcggtactatatctattgcgccaggtttcaatttctatcgcctatactttatttgggtaaatggtttggctaaggttgtctggtagtaaggtggagtgggtt

SEQ ID NO: 8745 - DNA, 383 bp, Homo sapiens
ctgtagagtgggcttatcatctttcaacacgcaggacaggtacagattcttttccttgaggcccaaggccacaggtattttgtcattactttcttctccttgtacaaaggacatggagaacaccacttgttgctccatatcctgtccctggaggtggagagctttcagttcatatggaccagacatcaccaagcttttttgctgtgagtcccggagcgtgcagttcagtgatcgtacaggtgcatcgtgcacataagcctcgttatcccatgtgtcgaagaagataggttcttcttcaaagatgaagggaaagaaggtgctcaggtcattctcctggaaggtctgtgggcagggaaccagcatcttcctcagcttgtccatgg

SEQ ID NO: 8746 - DNA, 368 bp, Homo sapiens; identical to SEQ ID NO: 8376

SEQ ID NO: 8747 - DNA, 605 bp, Homo sapiens
  unsure (11): n=A,T,C or G
  unsure (19): n=A,T,C or G
  unsure (512): n=A,T,C or G
  unsure (532): n=A,T,C or G
cctctacaacnctgaatgnggaatattttaaatgtaatctaaggaataaccactagggtgtggtaagtgaatatcagagtaaggctcatggagaacatggagtacttcctaaatcataattttattataaaatgacggaattactagttgtaattactgaatagcctatattgctatttattgtgtgtttcatcactttaggggtctagtatggtggatgttagtaattatctaagtgaatgaagaagcactccagtggaaagttcttatatgccattatgttcttttcctggcccagtgcctaagtgaagtaggtgtttataacttaacctaaacgtactaagatttcagatcaataaagttattaaaataaaattggtaccagccaattttcaaataaggttgctttttattttttaagtaaaattatgtttataattaaaccataagacaaatagtattttttttaaaaaagaaaagaatgtagttttattaataatttactgcattgntctcattctcaatttactgnggaccattagaaacttgtgtatagtctggcagtggaaaccatcagtgtttggaaatgaatggttgaaaaggct

SEQ ID NO: 8748 - DNA, 308 bp, Homo sapiens
ccagtttaggccggaaaagaatcatccattgcagatcagagcctttgctaaattgctgaataagaagatggttgagtcacctccttcgcttaaacttgtcctcattggaggttgtcgtaacaaagatgatgaacttagggtaaaccaactgagaaggctgtctgaggatttaggagttcaagaatatgtggaatttaaaataaacattccatttgatgaattaaagaattatttgtctgaagcaacaattggtctgcataccatgtggaacgagcattttgggattggagttgtggagtgtatggcag

SEQ ID NO: 8749 - DNA, 306 bp, Homo sapiens
aggttcggccttaacatagatcgatggttgacaatccagagtggtgaacagccctacaagatggctggtcgatgccatgcttttgaaaaagaatggatagaatgtgcacatggaatcggttatactcgggcagagaaagagtgcaagatagaatatgatgatttcgtagagtgtttgcttcggcagaaaacgatgagacgtgcaggtaccatcaggaagcagcgggataagctgataaaggaaggaaagtacacccctccacctcaccacattggcaagggggagcctcggccctgaacagagcag

SEQ ID NO: 8750 - DNA, 125 bp, Homo sapiens
ctggggccccatcatcatgggctgagagctccatgtctgtggggagctccttggcaacaggctgcagtaggacaggatgtgcttcatcgtctatttgggcttcctcagcgtcacccatggtacag

SEQ ID NO: 8751 - DNA, 193 bp, Homo sapiens
gttacacgcgggttcaacatgcgtatcgaaaagtgttatttctgttcggggcccatctatcctggacacggcatgatgttcgtccgcaacgattgcaaggtgttcagattttgcaaatctaaatgtcataaaaactttaaaaagaagcgcaatcctcgcaaagttaggtggaccaaagcattccggaaagcag

SEQ ID NO: 8752 - DNA, 604 bp, Homo sapiens
  unsure (475): n=A,T,C or G
  unsure (556): n=A,T,C or G
ggcaggtgtggtgccttggctaagtccacagacttctgagaggcccacgctttcttcttctccagaaataaaccctgaaactcaagcagctttaatcagagggcaggattccacgatagcagcatcagaacagcaagtggcagcgagaattcttgattccaatgatcaggcaacagtaaaccctgtggaatttaatactgaggttgcaacaccaccattttcccttctggagacttctaatgaaacagatttcctgattggcattaatgaagagtcagtggaaggcacggcaatctatttaccaggacctgatcgctgcaaaatgaacccgtgccttaacggaggcacctgttatcctactgaaacttcctacgtatgcacctgtgtgccaggatacagcggagaccagtgtgaacttgattttgatgaatgtcactctaatccctgtcgtaatggagccacttgtgttgatggntttaacacattcaggtgcctctgccttccaagttatgttggtgcactttgtgagcaagataccgagacatgtgactatggntggcacaaattccaagggcagtgctacaaatactttgcccatcgacgc

SEQ ID NO: 8753 - DNA, 126 bp, Homo sapiens
ccacacccaggagggttgattggcaggctggaagacaaaagtctcccaataaaggcacttttacctcaaagagggggtgggagttggtctgctgggaatgttgttgttggggtggggaggagttat

SEQ ID NO: 8754 - DNA, 494 bp, Homo sapiens; identical to SEQ ID NO: 8713

SEQ ID NO: 8755 - DNA, 597 bp, Homo sapiens
ccatcggtgctgaaattgagcattttaaatagtacagtaggctggtatacattaggaaatggactgcactggaggcaaatagaaaactaaagaaattagataggctggaaatgcttactttctgctctcattttctttcattttgtctgctgtctttttgaatgccaatactttcatttaaaatgttttgggagcacggcaacccaaaatgactgaacggtggtccaaaaatccaaaccaactgataattacttctcgaggtgataggaaaggcacaggaagttaggactttggctgaaatgatgaaaacacatgttcgccattttagggatcagcgcctcgactcctgccacctccggctccaacgatgatcatgtttggatgtatttattgaattgtcctttgctgatgaggaatttttaaagtatttcatagaataagtcctttggtatgcagatgctacatggaaggaaagaaagaaaaaaagaaaacacacaatattacttgctccataccctaaactgccgataccacagccgtaaaatgaaggtgtctagtagttgttatagcacggtagtccattctttctaaaggacc

SEQ ID NO: 8756 - DNA, 589 bp, Homo sapiens
cgcgtgcataaaaactggttctacaaatttttacttgaagtaccaggccgtttgctttttcaggttgttttgttttatagtattaagtgaaattttaaatgcacagttctatttgctatctgaactaattcatttattaagtatatttgtaaaagctaaggctcgagttaaaacaatgaagtgttttacaatgatttgtaaaggactatttataactaatatggttttgttttcaatgaattaagaaagattaaatatatctttgtaaattattttatgtcatagtttaattggtctaccaagtaagacatctcaaatacagtagtataatgtatgaattttgtaagtataagaaattttattagacattctcttactttttgtaaatgctgtaaatatttcataaattaacaaagtgtcactccataaaaagaaaactaatactaatagcctaaaagattttgtgaaatttcatgaaaactttttaatggcaataatgactaaagacctgctgtaataaatgtattaactgaaacctaacactgtttcagggctgtgagtgtgcatgtgttggaaatgtgcatggtgg

SEQ ID NO: 8757 - DNA, 603 bp, Homo sapiens
ccacagaacagtccctttttgagtaaagcagcaaggttgcttaatgacatgctatgtggttaacaagattcaactgccacatcaaggactttaaataatttcaagattttaaatgtatttatgaaatgaactcattacagcagctaatcaatgcaaactttgtcctttttctttgtctttctaagagaaactgaatttaatttaaatttaaattacagtgtctaaaacttggtaaaatattttaaatttgaataagaggaaaaaaaaaacatgaatttatttatgatggagcttcatacccaggacagtagcttcttaaatgttagtaaaataattatgttaagcattaaaacaattttgaatatgtaattaagcatttatgttaaaaaacatgtttcttacgtgtgtgtgtatatatttataactgacacatgtgattctttgtacagtatttagaatccttcccttcagatagcagtcctcttgtattcagtcttgtggctaaaatagatcaaaaacatattttaaaactgttaaagtaactgtatgactcatgcttgaagttctgaaatttgggagcgttatgaggtttccatgccatta

SEQ ID NO: 8758 - DNA, 591 bp, Homo sapiens
  unsure (589): n=A,T,C or G
cgcgtggatggatacagagcggcttctacacggcgccatcaacattctctttatgaacgtgagtggattctccaggcaaactatgcactatttcatggtcggaaagaatcaaaggaagtttaaatgagggtggagttaaactgtgctaaattacagtagtgcttattagtaactagatttcaaaaggttacagaaaatttacattctctacacaaaaactgcatctcctgcacagacaacatcgacatcgacacaggaaggaaactgattgtccattctttgcccaggaagtctcggtactttatagattcgtctttacctcttttttgttgttgttcttccgaaaaagcagtttaaatttttttctttttctttttatgctagggacgtggagatgttaaaacgacaacaaaaaatatatatataaaaacaggaatgaaatctgtgagagaatatttttggttctaaagacgggtgcatccgtttgtcttcgcccgaatcccttgctggagaccacacgagcagtgacattgcacggagagggcagctttgggttccgccgccgtcactgaaaccaccggaaggcggntc

SEQ ID NO: 8759 - DNA, 559 bp, Homo sapiens
  unsure (346): n=A,T,C or G
  unsure (547): n=A,T,C or G
gtgcgctgcaatccagacagtaattctgcaaactgccttgaagaaaaaggaccaatgttcgaactacttccaggtgaatccaacaagatcccccgtctgaggactgacctttttccaaagacgagaatccaggacttgaatcgtatcttcccactttctgaggactactctggatcaggcttcggctccggctccggctctggatcaggatctgggagtggcttcctaacggaaatggaacaggattaccaactagtagacgaaagtgatgctttccatgacaaccttaggtctcttgacaggaatctgccctcagacagccaggacttgggtcaacatggattanaagaggattttatgttataaaagaggattttcccaccttgacaccaggcaatgtagttagcatattttatgtaccatggttatatgattaatcttgggacaaagaattttatagaaatttttaaacatctgaaaaagaagcttaagttttatcatccttttttttctcatgaattcttaaaggattatgctttaatgctgntatctatcttat

SEQ ID NO: 8760 - DNA, 343 bp, Homo sapiens; identical to SEQ ID NO: 4922

SEQ ID NO: 8761 - DNA, 549 bp, Homo sapiens
  unsure (530): n=A,T,C or G
ccttaagcatttgctaaacaggttcaagtaagtttagtaaagtttcattactgccattgattcaattatcaaactgcttttgtacatataaagaattcttcagatgcatggtttctattaacaagatccaatgccttccttttatttccccttcagttcaacatctaatatataaagattgctctgactactacgcaataggcaaaagaagcagtgagacctacagagttacacctgatcccaaaaatagtagctttgaagtttactgtgacatggagaccatggggggaggctggacagtgctgcaggcacgtctcgatgggagcaccaacttcaccagaacatggcaagactacaaagcaggctttggaaacctcagaagggaattttggctggggaacgataaaattcatcttctgaccaagagtaaggaaatgattctgagaatagatcttgaagactttaatggtgtcgaactatatgccttgtatgatcagttttatgtggctaatgagtttctcaaatatcgnttacacgttggtaactata

SEQ ID NO: 8762 - DNA, 440 bp, Homo sapiens
cctgagctgtcatgcccaagggagacccagagacccaaattttcagtaaaaacttggaagagactctgattttgtttagaatagtggggggtggggacgaaatggggatgaggttgccagggtggagtgagacagcatcttggccctgggagtgtgggaaatttatgagtccttagatgaacagttaacaaaagttatgatgctaatggaaggcatcatagcttatttataagatgatacttaaacacttatgtgacatttaccatgtgctttggaggaggcacttttgttatcagccccatttccacagataagaaaactgaagcccagagaaataggtaagtggccccagcttacacagcttgcaagttgcggagccagggctggagctccaaaagcgctgcttggggtccacgcacttacctgttacttggcccagc

SEQ ID NO: 8763 - DNA, 159 bp, Homo sapiens; identical to SEQ ID NO: 7615

SEQ ID NO: 8764 - DNA, 332 bp, Homo sapiens
cctcagagtctgagtatagcctactccaattaagctagagttgttgacttttgcagaaatggaagcagtgggatccaactgatatttagctgcaatgccaaaacgagtgcagttggtacctgatgtccaagcaaggtttactgaagtgtcaagatcttcacaaactttctgataaattgatcctccaaattctgtcccatcattgacattagtgtgtagctggaagtccccagtcctgtagcccactgcaaagttattccttgtcagctttgatttggcactgtcaaaggtcatctggtagccagcaagccagccctcataaccaaagacag

SEQ ID NO: 8765 - DNA, 174 bp, Homo sapiens
cctggctcaacaaaagggctggggattggccctgaaaggagagagctgactgtcctggctgatggacaggagatcctcttagcactaccctaaggcaggcagttgggcattggtgtagacaacaggaaagtccaggctatagccgtactcaaaaacctttctgttccctttctg

SEQ ID NO: 8766 - DNA, 600 bp, Homo sapiens
ctggcaatgacaagactgggagtatcaaactaggattgttagttcaattaaaatttcagataaacaataatgtacttatactaaaaaattatttgttgtttatctgaaatgaaaatttaactgggtacccaattgtttgtttgtttaatctaaaaaccctgattgaaatttatctaataaaacatcatttaatatctaaaataaaataaatttactataacatctttataactattcaatcaatgattcatcttctatttttccaaattcttgcacaaatatttgatgcttaaataaatacataaataataaataggttaataagttacacttgaaaataatttatgttatgatgaaaaaacttaaagtgcttccacatgtcctcacaacatcactgtgaggtaagatggtggctaatactttttccacttagaaataaaggagaaaccaaggcacagtggaacaaggacttgtggatcctggctagcagactagggttgccagatttaacagaaaaaaatccaggatttccagctaaatttgactttatggcaaaatttattgtcccatcatttttatgtgatgcttcaaatatcacat

SEQ ID NO: 8767 - DNA, 600 bp, Homo sapiens
  unsure (587): n=A,T,C or G
ctgaggtggcagatagtgagcgctggtggcggagttaaagtcaaagcaggagagtaattatgaatagcgcagcgggattctcacacctagaccgtcgcgagcgggttctcaagttaggggagagtttcgagaagcagccgcgctgcgccttccacactgtgcgctatgacttcaaacctgcttctattgacacttcttctgaaggataccttgaggttggcgaaggtgaacaggtgaccataactctgccaaatatagaaggttcaactccaccagtaactgttttcaaaggttcaaaaaaaccttacttaaaagaatgcattttgattattaaccatgatactggagaatgtcggctagaaaaactcagcagcaacatcactgtaaaaaaaacaagagttgaaggaagcagtaaaattcagtatcgtaaagaacaacagcaacaacaaatgtggaattcagccaggactcccaatcttgtaaaacattctccatctgaagataagatgtccccagcatctccaatagatgatatcgaaagagaactgaaggcagaagctagtctaatggaccagatgagtagttgngatagttcatcag

SEQ ID NO: 8768 - DNA, 602 bp, Homo sapiens
  unsure (442): n=A,T,C or G
  unsure (489): n=A,T,C or G
  unsure (494): n=A,T,C or G
ccattgcaaagaaagcttctgtgaacattgctcctatgtcttttggtggacacatgcttccatttctccagggcagatacctaggagtggggttgctggtgtttggtgtgagtagtgtctgtttaggtttataaataacctgcccaactcttttccaactgtaccattttgcatttccaccagcagtgtgaacattccagtgtccccacccctctacccttgccagcacttggtgatgtcagtcttttctttttattgattctagtgagtatggagtggtattctgttgtagttttgacttgcatttcccaagactaatgacactgagcgctttttcatgtgcttacttgtcattcgtagtatcttctttggatagacaccttcatacattctaatttcactggcaaacgattatcccaaaatggattaatttatgactggngtctattatatcacataatgctgtgttaagtcttagggatgaaaganaaggnctgtgtgtacttctttttttctccccaaaaccacttattgagatggctagtgagataaaggtcatgttaagcagggcacagcagagttggaggagatggacaggaatg

SEQ ID NO: 8769 - DNA, 607 bp, Homo sapiens
  unsure (553): n=A,T,C or G
tcctactccgatgacaagttttatgcaactaatgacactgaggtcgcccagagcaattttgaggcccttcaagatttcttccgcctctttccggagtacaagaacaacaaacttttcctgaccggggagagctatgctggcatctacatccccaccctggccgtgctggtcatgcaggatcccagcatgaaccttcaggggctggctgtgggcaatggactctcctcctatgagcagaatgacaactccctggtctactttgcctactaccatggccttctggggaacaggctttggtcttctctccagacccactgctgctctcaaaacaagtgtaacttctatgacaacaaagacctggaatgcgtgaccaatcttcaggaagtggcccgcatcgtgggcaactctggcctcaacatctacaatctctatgccccgtgtgctggaggggtgcccagccattttaggtatgagaaggacactgttgtggtccaggatttgggcaacatcttcactcgcctgccactcaagcggatgtggcatcaggcactgntgcgctcaggggataaagtgcgcatggaccccccctgcaccaacacaacagacc

SEQ ID NO: 8770 - DNA, 537 bp, Homo sapiens
ctgttagggctgaatcttctggagaaaaaggtgccatctcaggagaatagcttttactctggtaggaatgcttccgagacaccacaaggcagcctgaacactcagttgcagggtcgggcttgcggtgggtgacccagagccaccaaagtcacatccacaactaatgagggaaatctgtaaagccagttagatagaagaattttatttttctgtgggttttgtgttgtcttttttatgttaaaaagaaatccagtttgtgtttttctatagaaaaagtaaaagatcaggttatactttaggttaggggttctatttattcctgttagtaaataaaattaacaaatttctttgtttaacaaaagattaatctttaaaccactaaaatacatagactgattgattattcaacacattggaattgatgtcggtcatagtttcctgaagcatttagttacaacctgaaggaataaaatgatttgtggaaatgcttaaaatagacctaactgaatacagtctcatcttgccgcgcctggctta

SEQ ID NO: 8771 - DNA, 229 bp, Homo sapiens
  unsure (20): n=A,T,C or G
  unsure (26): n=A,T,C or G
  unsure (31): n=A,T,C or G
  unsure (80): n=A,T,C or G
  unsure (138): n=A,T,C or G
  unsure (222): n=A,T,C or G
catatatttcgggtttatcnaagcancttcnccagggacgtgaaggaattcgccaaaatgctacgcttatcctatccctnggagctccaggtgtccgctggctgtgaggtgcaccctgggaacgcctcaaataacttnttccatgtagcatttcaaggaaaagatatcctgagtttccaaggaacttcttgggagccaacccaagaggccccactttgggtnaacttgg

SEQ ID NO: 8772 - DNA, 516 bp, Homo sapiens
ctgctaataatgcttatactatatttgtagcttaactagatgttaaactatggaactgttggtgccaatctgcttataaaggcaatgctctggagacaaagtcttctcacaaacagtgggcaagcaggtttcattattatgtgttcaacaacaatcctcagttcattaaataaggtccgacaatatgggtttcttcgagacgaatatcgaagggtaagaaatctatagtatataaaaggttggagcaaacttccttgaccactaaaaagcataaaaactgtcgcaggcatcaggaatatttcattgcaagcaatgaatttcagaatattttgttgattagcacttaatttgtccaagacagatctcagcagaggtaaactatttgagccccttgcgtcaaggacctttttcgtatatgtggcagcatgaagcaaagagaataacaagactgggaagatactcattgtaactggataggaatttacaaagatgagtgaatacaacaggtagtggcag

SEQ ID NO: 8773 - DNA, 450 bp, Homo sapiens
ctgtgttgtcgggcatggacgcctggtcagtgttccgctccttcttgaagacgatgttgccgagctgaagaacccctgagatgacccgcagcaggcccatttgctcctcttctgggatgcccataatcctcatggcctccatggtctcctggaacatgtccttgtcctgctgcccggggatggtgacgtgtccattggacaggaagcggtatttgttgtacggctccaacaggagatcggtcttcaggtgctctccagccccagacaggagataatagaagatgtggaaggtccgttcttccttggcttggcggatagcacgagatttctccaaaagataagtctcaatgttggctccaacaatgtagccattgacatcaaagttgatgcgaatgaatttgccgaagcgggaggagttgtcattcttcacggtcttggcgttcccgaagg

SEQ ID NO: 8774 - DNA, 601 bp, Homo sapiens
catcggtgctgaaattgagcattttaaatagtacagtaggctggtatacattagggaatggactgcactggaggcaaatagaaaactaaagaaattagataggctggaaatgcttactttctgctctcattttctttcattttgtctgctgtctttttgaatgccaatactttcatttaaaatgttttgggagcacggcaacccaaaatgactgaacggtggtccaaaaatccaaaccaactgataattacttctcgaggtgataggaaaggcacaggaagttaggactttggctgaaatgatgaaaacacatgttcgccattttagggatcagcgcctcgactcctgccacctccggctccaacgatgatcatgtttggatgtatttattgaattgtcctttgctgatgaggaatttttaaagtatttcatagaataagtcctttggtatgcagatgctacatggaaggaaagaaagaaaaaaagaaaacacacaatattacttgctccataccctaaactgccgataccacagccgtaaaatgaagggtctagtagttgttatagcacggtagtccattctttctaaaggaccacttac

SEQ ID NO: 8775 - DNA, 462 bp, Homo sapiens
gtcggagtggtctctggtagaacccaaggacttctgggtactgagaagcagcagcagaatgaggccaaatgcagagatgaggctaaggcaagaatatgccccaactaaagcatagattccccaaagtgaggctcatggtgggaggccactcaccttcctagctgctgctcgaaaaggttttgactgtgttggggtgggggttgggtaagggaatggtcaagactgagaaaggaatgaaatccattcaggaaatatcgacagggctacacgtgatgtccccaaactgctgctattgaagaacttcccaaaacttctttacaaagccctaaaggaaagtttgcatctatgaaaagccaataggctgagacatccaattgctgcatggaaattgatgtacattcaggggacggcaaaaatagctgtaaaatagtgaaaaagagcagtggttgtgctcttttctgg

SEQ ID NO: 8776 - DNA, 549 bp, Homo sapiens
  unsure (535): n=A,T,C or G
ccactaaagcatagtacgtagatgtcagtgagacagcatgagagccagcagtcatcaaagcgttccacgtttgaagttagcaactgcttaaagttatgccctattaaaattgctttctcaaaagtttgggttagtttcaaatgtgatattttggagggaaggtaaagtaggtatctttcaggtcgtgataatgagctcctatgaaaggatgcaatataatgacccgcttttctagaaagttcataatcagctctggaacaagcacacttgattcctcactgtgcttcagaatgagattaagatcagatgttggaacgtgctatgctgtagcgtgtctggaaacaaagtacacaaacctggctacggtgatgagttagcttctgcttactacctgtgacaacccaagtgggtgacactagtgaaccttctccagtctgcaggctggcatagaaggctcttagattatattgggcagcttgcaatctgccgaagcagtgacttgcatttccacacttggcttgagcactcaacccanaaggcgaagatagc

SEQ ID NO: 8777 - DNA, 408 bp, Homo sapiens
gtaggactttaatcgttgaacaaacgaacctttaatagcggctgcaccatcgggatgtcctgatccaacatcgaggtcgtaaaccctattgttgatatggactctagaataggattgcgctgttatccctagggtaacttgttccgttggtcaagttattggatcaattgagtatagtagttcgctttgactggtgaagtcttagcatgtactgctcggaggttgggttctgctccgaggtcgccccaaccgaaatttttaatgcaggtttggtagtttaggacctgtgggtttgttaggtactgtttgcattaataaattaaagctccatagggtcttctcgtcttgctgtgtcatgcccgcctcttcacgggcaggtcaatttcactggttaaaagtaagagacag

SEQ ID NO: 8778 - DNA, 382 bp, Homo sapiens
  unsure (215): n=A,T,C or G
  unsure (235): n=A,T,C or G
cctctctcacctctcctactcacttaaagcccgcctgacagaaaccacggccacatttggttctaagaaaccctctgtcattcgctcccacattctgatgagcaaccgcttccctatttatttatttatttgtttgtttgttttattcattggtctaatttattcaaagggggcaagaagtagcagtgtctgtaaaagagcctagtttttaatanctatggaatcaattcaattnggactggtgtgctctctttaaatcaagtcctttaattaagactgaaaatatataagctcagattatttaaatgggaatatttataaatgagcaaatatcatactgttcaatggttctgaaataaacttcactgaagtaaaaaaaaaa

SEQ ID NO: 8779 - DNA, 483 bp, Homo sapiens
  unsure (45): n=A,T,C or G
  unsure (162): n=A,T,C or G
  unsure (168): n=A,T,C or G
  unsure (231): n=A,T,C or G
  unsure (262): n=A,T,C or G
  unsure (333): n=A,T,C or G
  unsure (370): n=A,T,C or G
  unsure (473): n=A,T,C or G
ttttttttttttttttttttttgtacaaaaatatatttatttggngtaatagttacaaaatattcatttccacaataatattttagcaatgcattggaatgttaaaaaaaattctttgtattaatgattcttgcaaagaccctcaaaacatcccaggggtanaactgnggttcaagaggaaaagcaatttccccaagtctctgtatctaaaaaacactagtaccatgaaanataaacttaaaacatcaataacttaaataanaattaacattacttaaggcataatgtttcacatcaacaaacaaaattcattataataaaataaaacaaggngtctggggaaagctaggggaaaataagttagctgcanattcttgggttgtggagtgagtgttcaagtcttcggagtttgggtttgcttgtccaggtggtccatggaatcctgaacccacttctgcttggggtcagcacanatctccttgg

SEQ ID NO: 8780 - DNA, 369 bp, Homo sapiens
ccactgttgctgagaagagatgggtgatgggttcatatctaaatattaatcaagcctgatttcttgctctcaaattaaactgaggttacttgcctatttggtgcaatatcatcaccctaccacgtgataagcaacaaagtttaaatttatacgctaataatgccaaaagaaaatgttgataatttttatgtattagtggaaatcttttcaaccaattctggtcacttattttgggcaaattatatatatgtgtgtttgtgcattcatatgcaggctaacattcttgcattttcatgttttgcattttaagagactagttggaaaatgctgacctgacctagattttctgaatgataaatgctgccccac

SEQ ID NO: 8781 - DNA, 205 bp, Homo sapiens
  unsure (63): n=A,T,C or G
  unsure (69): n=A,T,C or G
  unsure (81): n=A,T,C or G
  unsure (93): n=A,T,C or G
  unsure (95): n=A,T,C or G
  unsure (108): n=A,T,C or G
  unsure (124): n=A,T,C or G
  unsure (128): n=A,T,C or G
  unsure (135): n=A,T,C or G
  unsure (145): n=A,T,C or G
  unsure (164): n=A,T,C or G
  unsure (199): n=A,T,C or G
  unsure (202): n=A,T,C or G
cttttttttttttttttttttttttttttttggaaaatttgcttttatttacacgtttgagtnaattanatgcatgttttntttttgaggagngnttagcaaaatgcnttaaaattttaaaatngcanttaaatntacaaaaatntagcttacaaaaaactgcnaatgtttaaaaatattctgctgcaaaatttttagngtncaa

SEQ ID NO: 8782 - DNA, 606 bp, Homo sapiens
  unsure (599): n=A,T,C or G
ctgtcccggttatgccggaatcgttgcaggtgagtccatcagaaacaggagctgacaacctgctgggcacccgaagaccaagccccctgccagctcaccgtgcccagcctcctgcatcccctcgaagagcctggccttgctatggatgcgcttaatcaccatggaggccagcaatacccatctcagcatggctttgatattctctacttcctggcctttaaaaatgacctataatttttcagtttgctttactatattttataaagaaaattctatcttatggttgattgagcattgagacttatgaaggcattaggatagatagctcaggaatgtaaaggttcagaaaaggtctgttttctcagattaacaaatatgatggattccatggctgaccttggtgcttaaaccaggaggtttcaatctagtcctagagttgtgtccctctgaaaggcccaatgccatgtaactaactttaaactggatatatactttgagccttacttaattcacagataagttgacttaactcagtatttttatttcaattaatgaaaacagtcctcttttcaaccccaggttgcttacattttgctggnctcccca

SEQ ID NO: 8783 - DNA, 264 bp, Homo sapiens
agaagcagttgcctgccaaattgaagactacctttcaaatagcaaaagagagagagaaggctgatatttcggcttttaaataaagatttgtgtggttctgcttttactgtaactgtcactttcccagtgaaaatgatttcatatacattgagggtcttacaggtatgggtaaagttctataaattgcaacaaaatgatacccaatttcattttatcctttttgtattgtgaaactggaaactttatgacattgtaaattatcag

SEQ ID NO: 8784 - DNA, 706 bp, Homo sapiens
  unsure (1): n=A,T,C or G
  unsure (6): n=A,T,C or G
  unsure (12): n=A,T,C or G
  unsure (676): n=A,T,C or G
  unsure (690): n=A,T,C or G
ncgacncactanagggcgaattgggccctctagatgcatgctcgagcggccgcccgggcaggtagaaattctatgtggtttcctaatgaagtttctagcagttgtgatgtcttcaaattctcatttaagattttatttagagttaagtcacatgagagatactttcaatgttgtcatctcaatacaaacctgcatacggcatttcactaaatccaggggaaccacagcagtgtgtgtcagaccacaacttaagaccccaccaaagccacacagtgcataatacttcgcggagccaaattcacaactgtactctgtagtaagagaagacacaccatgcattttaatataaaactcatgttactggtcataaacttacctcctggacagttaggtttccacacagcttgttagatgactatatcttataacttaacagtcagtcatgcttcaatatgctctagtccagcatgcaaaacaaacctgcattctgcatttaaccagatctagaggaaccaatgctgtatgtgttgtgccacagctaataattcctccaagtccacaaaggataaagaatctgccagatccatagtcacagctatactgctctgtttgattggaaaaaaaaaaatcaagtaagtatttcttcagagatgactaaggccactggaatgaaagnaaatgtttccctgngagatactattatcac

SEQ ID NO: 8785 - DNA, 536 bp, Homo sapiens
ctgcaacacatgctaaggcacttttattatataaaaaagggggtagggtgggagtttcactcactcctttgtgacagcaactgggacctgaattcagagctttgtaggcatatgcagcttttatatcacttcatgatttgagagtttgtttcctttaaaaaaaaaaaatgccttcttgccgtaagtctcaatgcagcatatacaaaacagttaggaatacaagtaaattcggcaaccagtgtagaccagtgaggacgagctactctcttctaaacaaaggcagtgagaaagactcggaattttatcatttattacaagaaaggggaaaaaagaaaaccttattttgctttcaaaaatacctgtgcaggtggcagatttttaaactatactgagtcaacggtgcaggtaaaccaccctcgggcccagtcctagagtagacacaagatcgcctgggagggccgctggcccctctaacgctctggctgtcagacttgggacaagtcccttaaccattaaatatatttggtcccccaaga

SEQ ID NO: 8786 - DNA, 604 bp, Homo sapiens
  unsure (566): n=A,T,C or G
ccactgtgtagcaccttctaattcaatttcatcggcagttgtaataacagttccagcctcaggtgttttaatggtgggaaacatcttgattgcttctccagaaacttgaccatcggttttgttttggaaatcttggagaatctcagttccttccacagcaataagttctgtgggagaagcttccatttcttctaataactcaggtttaccatcatcttctgaaggttctaattttgtgtcaggagataaagagggaggctcagttatgtgaaggtattcctcacttgatggtttgaaagtcgcttcaatatttacatgaatttccttaaaagaatcctgtggggacattacagatgagccgacgtctattcctggcagagcactgggctgggggatctctgtgtgtccagaggcttcactgcctgagtagatagtgaggggagatgatggtgtctgagaagacaacttcgcaaatgttgaaactgctaatgttgtatcagtgtaatatgggggattggatccttccatcacatcaggcacctctgttacactctgatccataaggngggtagtagcaatacttagatagggagtatggtctact

SEQ ID NO: 8787 - DNA, 356 bp, Homo sapiens
ctgctgaggactcgatagcggtgccgcttgcctgccaatttgcccttgacgatctgggagccagagagaggcacatgccgcccattgaagctacagagagaaacagggagggcagaggcttaagtggaacaggagagggaaggttttttgattttttttttgtttttttttgagagagtcttgctctgttgcctaggctggagtgcagtggcatgatctcggctcactgcaatgtccacctcctgggttcaagcgattctcctgcctcagcctctcaagtagctgggattacaggcacctgccaccacgcccagccaatttttgtatttttagtagagacaatttcactatgttgg

SEQ ID NO: 8788 - DNA, 281 bp, Homo sapiens
  unsure (24): n=A,T,C or G
  unsure (27): n=A,T,C or G
  unsure (56): n=A,T,C or G
  unsure (85): n=A,T,C or G
  unsure (90): n=A,T,C or G
  unsure (97): n=A,T,C or G
  unsure (102): n=A,T,C or G
  unsure (140): n=A,T,C or G
  unsure (154): n=A,T,C or G
  unsure (164): n=A,T,C or G
  unsure (196): n=A,T,C or G
  unsure (198): n=A,T,C or G
  unsure (211): n=A,T,C or G
  unsure (240): n=A,T,C or G
  unsure (248): n=A,T,C or G
  unsure (255): n=A,T,C or G
  unsure (265): n=A,T,C or G
tttttttttttttttttttttttnganattcatattttatttacaagtaaatgaanactgtccctgtaaactctaatttgggatntgaanaacaatntaaanaagtagttgctggtgccacagtgatgtgtgaaggagtntatgccactgtttntttaaacagngattttgttattaaaaaaaaaacccacctacncnatttcttcatgtngcatatgtaaaataattaaaaataaaagngacttttnaaaactntacagtctgngatcaaatgcgtgagg

SEQ ID NO: 8789 - DNA, 580 bp, Homo sapiens
gggagtacacagaactctactttctgctcaatttttctgaaaatctagaattgctcttaaaagagctcttgagtatctatctaggagtggaactgctggatacagataatgcaaaccagttttctatatagttatgtaagaatctgaggctggacacagtgcctcacacctgtcattccagcactttggaaggcagaggcaggaggatcacttgagcccagaagtttgagattagcctgggaaacatggggagaccccaactctacaaaaatagtaaaatattagctgagcatggtggtgtgtgcctgttgtctgagctacttgggaggctgaggtggggaggatcgcttgagcctaggaggtcaaggttaccgtgagctatgattgtgtcactacagcctgtgtgacacagcaagaccctgtctcataaacaaacaaataaactaattaaggaaggagatatagtgaagaggacaggagccattgtggacgttccagttggtgaggagctgttgggtcgtgtagttgatgcccttggtaatgctattgatggaaagggtccaattggttccaagacgcg

SEQ ID NO: 8790 - DNA, 601 bp, Homo sapiens
ccaaaattttaaattacaacagattgttcaatttgatggatctctcagtaaacttcagtttgaaacaacaaaaaaatactgtttactaaaacataaaaaatgtttccaagaaattatcatccaatttgaaaaataaaaaatgtaacccatagtaagtaagaaaaatacaagagaaaatcaaactttgttggaatcaagagaataccatgaacttaaaaacttcctaaatcagtagcatatcctgtattaccatgtgtagaaaactgtaattaattaatgtaaggtagtttttattagttgcataacctaaaaatacaaggaaattttggaatatacctctaaaaagaccacgaaattgtcactgaaatacacatttcttgagacaatgggcaaacttcccatttatgggaaatatcttctttttttcacacagtgaaacagagaaaaattatatcaaatgagaaatatttttctctaaaataatcttcttaaatacctcaataatgcaatacttgggaaatgtaaattttcaaaactcagacttgaaataggttattattaaacaaatatacataaatcttattgcttggcacgatttttc

SEQ ID NO: 8791 - DNA, 601 bp, Homo sapiens
  unsure (546): n=A,T,C or G
ccattctaaagttggtgagtttgtcaagcaactatcgacttgatcagttcagccaagcaactgacaaatcaaaaacccacttgtcagttcagtaaaataatttggtcaaacaacagtctattgcattgatttataaatagttgtcagttcacatagcaatttaatcaagtaatcattaattagttaccccctatatataaatatatgtaatcaatttcttcaaatagcttgcttacatgataatcaattagccaaccatgagtcatttagaatagtgataaatagaatacacagaatagtgatgaaattcaatttaaaaaatcacgttagcctccaaaccatttaattcaaatgaacccatcaactggatgccaactctggcgaatgtaggacctctgagtggctgtataattgttaattcaaatgaaattcatttaaacagttgacaaactgtcattcaacaattagctccaggaaataacagttatttcatcataaaacagtcccttcaaacacacaattgttctgctgaagagttgtcatcancaatccaatgctcacctattcagttgctctgtggtcagtgtggctgcataacagt

SEQ ID NO: 8792 - DNA, 545 bp, Homo sapiens
  unsure (442): n=A,T,C or G
  unsure (502): n=A,T,C or G
ctctgataaaacagactttaaaccaacaaagatcaaaagagacaaagaaggccattacataatggtaaagggatcaattcaacaagaagagctaagtatcctaaatatatatgcacccaatacaggagcacccagattcataaagcaagtccttagtgacctacaaagagacttagactcccacaaaataataatgggagactttaacaccccactgtcaacattagacagatcaacgagactgaaagtcaacaaggatacccaggaattgaactcagctctgcaccaagtggacctaataaacatctacagaactctccaccccaaataaagaggatatacatttttttcagcacaccacacctattccaaaattgaccacatatttggaaataaagcactcctcagcaaatgtaaaagaacagaaattataacaaactgnctctcagaccacagtgcaatcaaactagaactcaggattaagaaactcactcaaaactgntcaactacatggaaactgaacaacctgcttcctaagtgactac

SEQ ID NO: 8793 - DNA, 603 bp, Homo sapiens
  unsure (484): n=A,T,C or G
cctggttctggaatcctcagttcaaggttatcctacgcagagagccaggtaccaatgggtgcgctgcaatccagacagtaattctgcaaactgccttgaagaaaaaggaccaatgttcgaactacttccaggtgaatccaacaagatcccccgtctgaggactgacctttttccaaagacgagaatccaggacttgaatcgtatcttcccactttctgaggactactctggatcaggcttcggctccggctccggctctggatcaggatctgggagtggcttcctaacggaaatggaacaggattaccaactagtagacgaaagtgatgctttccatgacaaccttaggtctcttgacaggaatctgccctcagacagccaggacttgggtcaacatggattagaagaggattttatgttataaaagaggattttcccaccttgacaccaggcaatgtagttagcatattttatgtaccatggntatatgattaatcttgggacaaagaattttatagaaatttttaaacatctgaaaaagaagcttaagttttatcatccttttttttctcatgaattcttaaaggattatgctttaatgct

SEQ ID NO: 8794 - DNA, 360 bp, Homo sapiens
cgcaatgcctatgtctggagtcagaaagatggtgtttggaagccaaccctggtgatcctgagaattaatcgcgcagctacttttgtgaagtggtcccccctagagaacaaatttgctgtgggaagtggagcacgactcatttctgtttgttactttgagtctgaaaatgactggtgggtgagcaagcacattaaaaagccgattcgctccacagtcctcagcttggattggcatcccaacaacgttttgctggcagcaggatcatgtgacttcaaatgcagagtgttttctgcctacattaaagaagtggatgaaaagccagccagcacgccctggggcagcaagatgccttttgggcag

SEQ ID NO: 8795 - DNA, 447 bp, Homo sapiens
  unsure (10): n=A,T,C or G
gtccaggggnaattgagggaggctctaagctaggggcactgcatggtgggacaggatggccccttgaggactgaaccctggggagaagacaaacagtaataataaaaacaaataacaagtactttaagaatggattgtatgacctatagtgacagatgacatcactaatactgaaagctttttatattaataattttggcaaaatgtcattttgtaatatagtatatgctttccaggtgtgggggtggtaaagtaatgaggccaaaatcatcctgccccaagactaatatcttctaatggtgcattagcaaggaaggcagaaatcaatatttagatatcagtagagtacataatactgtagaaagaagaagagcacacatgagacagagaaggaggtggatgctcctgggttgagagcaaggggtgggggtgtggaagggactaggc

SEQ ID NO: 8796 - DNA, 422 bp, Homo sapiens
  unsure (224): n=A,T,C or G
  unsure (264): n=A,T,C or G
  unsure (341): n=A,T,C or G
ttttttttttttttttttagctgccatcttgcgtccccgcgtgtgtgcgcctaatctcaggtggtccacccgagaccccttgagcaccaaccctagtcccccgcgcggccccttattcgctccgacaagatgaaagaaacaatcatgaaccaggaaaaactcgccaaactgcaggcacaagtgcgcattggtgggaaaggaactgctcgcagaaagaagaaggnggttcatagaacagccacagcagatgacaaaaaacttcanttctccttaaagaagttaggggtaaacaatatctctggtattgaagaggtgaatatgtttacaaaccaaggaacagngatccactttaacaaccctaaagttcaggcatctctggcagcgaacactttcaccattacaggccatgctgagacaaagca

SEQ ID NO: 8797 - DNA, 202 bp, Homo sapiens
  unsure (8): n=A,T,C or G
  unsure (19): n=A,T,C or G
  unsure (166): n=A,T,C or G
gattaatnttgggacaaanaattttatagaaatttttaaacatctgaaaaagaagcttaagttttatcatcctttttttctcatgaattcttaaaggattatgctttaatgctgttatctatcttattgttcttgaaaatacctgcattttttggtatcatgttcnaccaacatcattatgaaattaattagattcccatgg

SEQ ID NO: 8798 - DNA, 576 bp, Homo sapiens
ctgtatgatttcagcagccaaagctggatgatggactgaaacattactatacaactgggacaaaacatatacaatatcacaatactaagcaaaaacgctttacacccaaagaaataaaacaggttacaaaatgtggagaatttagcaggcaaaactgtattacaagcaacattttaaatcatcatttttaatccattgcaactatttaaaacatctaaaacaaatataaaaatgagccttttagtattttactgacgtgatttttttgtctttaaatatttgttaaagcttgatgttatactcaaagtacatattatatagctaaaatgtcaagtgagaagagtgtatacaaagtggtccaagttttatttcaaactctgatttccaattaacccttctaagtattattctttaagttatagtttcatccatggtgaaaaagatttagaaggttgcctaaaattttcacatctatgtctttgagtaaataattagaccatgttgaaaattcccaggtctagtaaatcaggtttaaaatattctgaacttgtagaaataccaactggtaacagttgg

SEQ ID NO: 8799 - DNA, 374 bp, Homo sapiens
  unsure (26): n=A,T,C or G
  unsure (31): n=A,T,C or G
  unsure (36): n=A,T,C or G
  unsure (68): n=A,T,C or G
  unsure (102): n=A,T,C or G
  unsure (132): n=A,T,C or G
  unsure (146): n=A,T,C or G
  unsure (159): n=A,T,C or G
  unsure (163): n=A,T,C or G
  unsure (169): n=A,T,C or G
  unsure (184): n=A,T,C or G
  unsure (201): n=A,T,C or G
  unsure (208): n=A,T,C or G
  unsure (218): n=A,T,C or G
  unsure (239): n=A,T,C or G
  unsure (252): n=A,T,C or G
  unsure (268): n=A,T,C or G
  unsure (293): n=A,T,C or G
tttttttttttttttttttttttttngattnaaaanattttattttctttatgcaggtaggcagttanaaatttcaaagtctaacaatgacattcttgaagngggcacagccttttaaactcaggctatgtntacagtaaccttgnggaactggttcanccanatcttnactttcatgaaagcncagggtctgtccttttntttccanagggctcctntcatattccatcgccagtttntgttacaaggcanactgaatcaagccaanatcaacacacactggtacacgtggntcccaaccaattttatatgtatatatatattctacttccaacacccgcattcatcctggttcaatcaaagcctggttttgg

SEQ ID NO: 8800 - DNA, 434 bp, Homo sapiens
ccacggccaaggaggatgctggcctggaaggggacttcagaagctacggggcagcagaccactatgggcctgaccccactaaggcccggcctgcatcctcatttgcccacatccccaactacagcaacttctcctctcaggccatcaaccctggcttccttgatagtggcaccatcaggggtgtgtcagggattggggtgaccctgttcattgccctgtatgactatgaggctcgaactgaggatgacctcaccttcaccaagggcgagaagttccacatcctgaacaatactgaaggtgactggtgggaggctcggtctctcagctccggaaaaactggctacattcccagcaactacgtggcccctgttgactcaatccaagctgaagagtggtactttggaaagattgggagaaaggatgcagagaggcag

SEQ ID NO: 8801 - DNA, 607 bp, Homo sapiens
  unsure (524): n=A,T,C or G
ggggaccgagtctttgtccactacactggctggctattagatggcacaaagtttgactccagtctggatcgcaaggacaaattctcctttgacctgggaaaaggggaggtcatcaaggcttgggacattgccatagccaccatgaaggtgggggaggtgtgccacatcacctgcaaaccagaatatgcctacggttcagcaggcagtcctccaaagattccccccaatgccacgcttgtatttgaggtggagttgtttgagtttaagggagaagatctgacggaagaggaagatggcggaatcattcgcagaatacagactcgcggtgaaggctatgctaagcccaatgagggtgctatcgtggaggttgcactggaagggtactacaaggacaagctctttgaccagcgggagctccgctttgagattggcgagggggagaacctggatctgccttatggtctggagagggccattcagcgcatggagaaaggagaacattccatcgtgtacctcaagcctanctatgcttttggcagtgttgggaaggaaaagttccaaatcccaccaaatgctgagctgaaatatgaattacacctcaagagtt

SEQ ID NO: 8802 - DNA, 414 bp, Homo sapiens
  unsure (7): n=A,T,C or G
  unsure (11): n=A,T,C or G
  unsure (21): n=A,T,C or G
  unsure (24): n=A,T,C or G
  unsure (35): n=A,T,C or G
  unsure (43): n=A,T,C or G
  unsure (55): n=A,T,C or G
  unsure (70): n=A,T,C or G
  unsure (79): n=A,T,C or G
  unsure (80): n=A,T,C or G
  unsure (85): n=A,T,C or G
  unsure (143): n=A,T,C or G
  unsure (207): n=A,T,C or G
  unsure (304): n=A,T,C or G
  unsure (315): n=A,T,C or G
  unsure (339): n=A,T,C or G
  unsure (353): n=A,T,C or G
  unsure (354): n=A,T,C or G
  unsure (385): n=A,T,C or G
  unsure (398): n=A,T,C or G
aatgaangtgnacatctattnctnagggagtgtgnaggcacanaaactgttattngggcattctacgganggagatatnnttgancttgttgatggtcactttgataccaagattggacacaaagtagagagtgaaagttacngaaagattgcagacagcattgggtgctcaaccaacaacattttgtttctgacagatgttactcnagaggccagtgctgctgaggaagcagatgtgcacgtagctgtggtggtgagaccaggcaacgcaggattaacagatgatgagaagacttactacagnctcatcacatncttcagtgaactatacctgccttnctcaacctagagannggttgttaaggcagaccgccctgttccccanagttgtccctgtngtgtctaggtttattc

SEQ ID NO: 8803 - DNA, 504 bp, Homo sapiens
  unsure (8): n=A,T,C or G
  unsure (10): n=A,T,C or G
  unsure (489): n=A,T,C or G
gattgtancnatgttggtgtatctcgtgtacaagatggaaaagtgcttttgttgttctacctgatccagttgggggagcaggaatagggggtgcctgcctaacggcctctagcccatgtgcttatactgggatctgtcccgagggatctgcacctggttggcagtcattttgtggtggacgtggtaaatcgcgagtgttaccatgatgacgaggcccaagatgagccccaaaatcaggggcaaggtttcttccagttgcccccgctcatccactgggcatttatgctcttcactgaagacaaaatctgagataatgtcaaaaggttggatgtggaccgcagacaggatcatggtgaccgtcttctgcggatcactagaggccagtgaaatggtttgttgagcttgacactcataggacttcccagcgggggtgaccaaggcagagaggtggtgcgagttggctgtgtgcttcccagcactgactgcgtnttttgaagtgggttt

SEQ ID NO: 8804 - DNA, 205 bp, Homo sapiens
  unsure (5): n=A,T,C or G
atggngattgatgaggagcttctgggagatggacacagctatagtcctagagctattcattcatggctgaccagggccatgtacagccggcgctcgaagatgaaccctttgtggaacaccatggtcatcggaggctatgctgatggagagagcttcctcggttatgtggacatgcttggtgtagcctatgaagccccttcgctgg

SEQ ID NO: 8805 - DNA, 525 bp, Homo sapiens
  unsure (17): n=A,T,C or G
  unsure (18): n=A,T,C or G
ccaattatttccaattnntattttattcttaaaacttaagcatggtaaaatgttaagctgttttcatccactgatattattctactataaaaagcccttcttgagcagatttgatgataaaaaggagaacatttctaaggtataattagagaagctgttgcatgagaaatcatgtctccatctccattttgctatgcgttatctgaggattgtttctgaaagagatctatttaggcagtgtatgtatgtgtcagcatgtaaaaagtaaagaactgaaaatagacaaaccttgtaaatgcacttcaaaaccaattgtggctcaagtgtaggtggttccccaaggctggtaccaatgagactggggtttgggaattagttggtcatcatccctcctgctgcccagcagtggtcagtcatttttcatgagggatggactaggaaaatgaagtgtctattataaggagagttcctgtaacttaaggagcaagctcactacaaaacccagctacctgcttatcgtagtgg

SEQ ID NO: 8806 - DNA, 399 bp, Homo sapiens
  unsure (18): n=A,T,C or G
cgccgccatgtccgacancgagaagctcaacctggactcgatcatcgggcgcctgctggaaggtgacatacacggccagtactacgaccttctgcgactatttgagtatggcggtttccctcccgagagcaactacctctttctgggggactatgtggacaggggcaagcagtccttggagaccatctgcctgctgctggcctataagatcaagtaccccgagaacttcttcctgctccgtgggaaccacgagtgtgccagcatcaaccgcatctatggtttctacgatgagtgcaagagacgctacaacatcaaactgtggaaaaccttcactgactgcttcaactgcctgcccatcgcggccatagtggacgaaaagatcttctgctgccacggagg

SEQ ID NO: 8807 - DNA, 603 bp, Homo sapiens
  unsure (16): n=A,T,C or G
  unsure (543): n=A,T,C or G
  unsure (544): n=A,T,C or G
ctgaaagatgagtttnttaaacttctgcagatttcactgtggggaaataagtgtgatctgtctctctcaggtggagaaagtagttctcagaataccaatgtactaaattcattggaagacctaaaacctttcattttattgaatgatatggaacatctttggtcattgcttagcaattgcaagaaaacaagagaaaaagcttctgctactagagtgtatattgttctcgataattctggatttgagcttgttacagatttaatattagccgacttcttgttgtcctctgaactggctactgaggttcatttttatggaaaaacaattccatggtttgtttctgatactactatacatgattttaattggttaattgaacaggtaaaacacagtaatcataagtggatgtccaagtgtggggctgactgggaagagtatattaaaatgggtaaatgggtttaccataatcatatattttggactctgcctcatgagtactgtgcaatgcctcaggttgcacctgacttatatgctgaactacannaaggcacatttaattttattcaagggtgatttgaattacaggaagttgacaggtgacag

SEQ ID NO: 8808 - DNA, 608 bp, Homo sapiens
  unsure (15): n=A,T,C or G
  unsure (16): n=A,T,C or G
  unsure (551): n=A,T,C or G
  unsure (593): n=A,T,C or G
  unsure (600): n=A,T,C or G
cctttggtcagagtnncagttggataaaccatgtgatttaatgtgaacatctgtttttgctctggaaggaggctggagtgagtagctcaatcagtctagagggtgctaaatgcttaggtaagggactctgataaaacttctggacacccaagctcagaggaactactctagtggacagcactttgcatgtgctgtcattcatcatttaggggaaaattaagtgtgtcctagtgtcattacactggaaagagacactaagaaatgtatgtctggcttctatttgccccatctgccatttccctttgcccttttgatctgtatcttttccctgaatgaacagtatccataaataccacaggctttctgagtcctctgagtttttctagtgaattgccaaaaccaaggattgttttggagtaaaacaaaactcaaacaaggctgttatgagaattaaatacaacagtgcatttaagatagtgcctggtatatgatacaaattcaatcaatttttgtagttatagttaccttaagccccttacatgttgcatgtntaaaactaacacaattgatagtcactctatttatttatctgngaactgnctttcttc

SEQ ID NO: 8809 - DNA, 330 bp, Homo sapiens
  unsure (19): n=A,T,C or G
ctgcatcccatgtgcgtcnatgggcaaagtatttgtagcactgcccttggaatttgtgccagccatagtcacatgtctcggtatcttgctcacaaagtgcaccaacataacttggaaggcagaggcacctgaatgtgttaaaaccatcaacacaagtggctccattacgacagggattagagtgacattcatcaaaatcaagttcacactggtctccgctgtatcctggcacacaggtgcatacgtaggaagtttcagtaggataacaggtgcctccgttaaggcacgggttcattttgcagcgatcaggtcctggtaaatagattgccg

SEQ ID NO: 8810 - DNA, 347 bp, Homo sapiens
cccgaagatgataccatccctgatgaggaacattttattgacatagaagatacaccaggatatcagactgccttctcacagttggcatttgctgggaaaaaagagcatgatcctgtaggtcaaatggtgaataaccccaaaattcacctggcacagtcacttcacaagttgtctaccgcctgtccaggaagggttccatcaatggtgagcaccagcctgaatgcagaagcgctccagtatctccaagggtaccttcaggcagccagtgtgacactgctttaaactgcatttttctaatgggctaaacccagatggtttcctaggaaatcacaggcttctgagcacag

SEQ ID NO: 8811 - DNA, 491 bp, Homo sapiens
  unsure (19): n=A,T,C or G
  unsure (456): n=A,T,C or G
ggccagcctcagcctcccnaagtgctgggattacacgtgtgagtcaccacgccaggcaaggcatggatgttttccaaaaactccctaggggatcttgatatttatctaggtctggtctgaatcatatgatatgctttataactattatctacccatacatgtgtacatttctatccttcctatgttttttaaactgaggtataaattagataatgtacacatgttgatgaattttgatctaggtatacactgtgtacctatcacccagattaaaatatagaacgtttctcttccccaaaggtcattgctatcctgttaccaccttcagttttgcacgttcttgaacttcaggccagtgctgctgtggatgccagtggtttttttttcactgctgagctgtattctgttgtgtggatataccacaattttattatccatcctctgttgacagggttngtttccagtctttcactactgcaaataatgctgct

SEQ ID NO: 8812 - DNA, 617 bp, Homo sapiens
  unsure (18): n=A,T,C or G
  unsure (19): n=A,T,C or G
  unsure (20): n=A,T,C or G
  unsure (36): n=A,T,C or G
  unsure (583): n=A,T,C or G
atttgttatcagtgtacnnnctaattgagagcattncagtagtatcaaacaataatgtctactgtttatagtccacttaataaaaatagaggcatttactatttgccttaggctgataggaatgtgggttttcttgaccaaatatatcagcatctaattgaaatgaccaaatagcattcttagacttctgtattatgaatataattgatatttaaattaatgtcttgttcacatatgtgtactttcatatttgattttaaaatgtacattataacctgtatggtattttatttaaaggagataaacagccaaatagcaaataggtcactgaatgataagatttgcaccttagaacaataatcattttaaggataacaagtaaatgtctgaaagcatgaggggctttatttgcctttacctcatatgagtctttgatcttgaaccgatacttttggatctcattgttgatatacctgaatttactttgtaagagattttaacttcacttcatgctgatgatgtatcaaattcattttatagaaagatttaaagtttttttctggaagtgatatatgtcaaattncatttcctactgcagtatttgagcagggacagtc

SEQ ID NO: 8813 - DNA, 444 bp, Homo sapiens
  unsure (19): n=A,T,C or G
ccagttttgaggatcagangaagaaaggcttcctctgtgacattactttaatcgtggagaatgtacatttccgggcccacaaagccttacttgctgccagtagtgaatacttctcaatgatgtttgcagaagagggggaaatcggccaatccatttatatgctggaaggcatggttgcagacacctttggtatcctgctggaatttatctacacaggttatctccatgccagtgagaaaagtacagaacaaatcctggctactgctcagttcttaaaagtctatgacctggtaaaggcttacacagacttccaaaataatcatagctccccaaagccaacaactttgaacactgctggtgccccagtggttgttatctctaataagaaaaacgatcctccaaagcggaaacggggaagaccaaaaaaagtcaatacattgcagg

SEQ ID NO: 8814 - DNA, 618 bp, Homo sapiens
  unsure (15): n=A,T,C or G
  unsure (16): n=A,T,C or G
ccacctggagacggnnattttgggcctattgaagacacctgctcagtatgacgcttctgagctaaaagcttccatgaaggggctgggaaccgacgaggactctctcattgagatcatctgctccagaaccaaccaggagctgcaggaaattaacagagtctacaaggaaatgtacaagactgatctggagaaggacattatttcggacacatctggtgacttccgcaagctgatggttgccctggcaaagggtagaagagcagaggatggctctgtcattgattatgaactgattgaccaagatgctcgggatctctatgacgctggagtgaagaggaaaggaactgatgttcccaagtggatcagcatcatgaccgagcggagcgtgccccacctccagaaagtatttgataggtacaagagttacagcccttatgacatgttggaaagcatcaggaaagaggttaaaggagacctggaaaatgctttcctgaacctggttcagtgcattcagaacaagcccctgtattttgctgatcggctgtatgactccatgaagggcaaggggacgcgagataaggtcctgatcagaatcatggtctcccgcagtgaagtgga

SEQ ID NO: 8815 - DNA, 613 bp, Homo sapiens
  unsure (18): n=A,T,C or G
  unsure (589): n=A,T,C or G
ctgctcttgaaggacagngacttgttaccaccacaacagcagagcctgccatccccaacagatcaccagttgtccctgacatcgtgccctaccttgtctccctttgtggtctcctaaatgcccatctcgttggccttggttcggctagtggtatggaggggtgctgcctagcactgacctgagagtgtgtgtgacccactgacccaatggtgagaactgactgcccacctctccaactgattgttcaaagggtagaggagacaaagtgcagatctcaccctttcttggtattttcccttctacccttttggaagatagagtggctatttgaagttaaaggaaagggaaggggcacagaaacagtattacttggtgtgtttgtgtagtgggttttcttggggagggagaggagagttaagtactttaaaggatagaaagaaaataatgagacaagagagtttaggtgtgcttgggaactgtcttaggtaatgatcctggaagaggccagcttgtactggaacccagatatgcttaggagtcaaccttgacattgaagtcatttgcatttctttcctactggctaccagancctctcagtcatcatactgagact

SEQ ID NO: 8816 - DNA, 351 bp, Homo sapiens
  unsure (18): n=A,T,C or G
gtctttaaaccctgcgtngcaatccctgacgcaccgccgtgatgcccagggaagacagggcgacctggaagtccaactacttccttaagatcatccaactattggatgattatccgaaatgtttcattgtgggagcagacaatgtgggctccaagcagatgcagcagatccgcatgtcccttcgcgggaaggctgtggtgctgatgggcaagaacaccatgatgcgcaaggccatccgagggcacctggaaaacaacccagctctggagaaactgctgcctcatatccgggggaatgtgggctttgtgttcaccaaggaggacctcactgagatcagggacatgttgctgg

SEQ ID NO: 8817 - DNA, 385 bp, Homo sapiens
  unsure (15): n=A,T,C or G
cctcgtgcttcgccngcgcctcgtgcagcagcagcaggttgccctcgctcacagctctggttacttccgcaaactgcatcaggtgatactttttcaggagctccacagtgggcatgtgacccaatagcatttttactggaagcaaatagatcagaatcatccttttgttcttctgactagaacggtgacaatgctcaaaggcaaatgacaggtactcctcagcttgcttaaaatcgctgtcaaacatagccttgcgtccaacgtagtatttgtatgttactctctgtgcagtgctgtaatcgtctttcaggtttgagctgtcaattgctctaattaggggtttacataaatggagtttgttgatcttgaagtagattttaaacag

SEQ ID NO: 8818 - DNA, 575 bp, Homo sapiens
  unsure (17): n=A,T,C or G
  unsure (18): n=A,T,C or G
  unsure (143): n=A,T,C or G
  unsure (262): n=A,T,C or G
  unsure (265): n=A,T,C or G
  unsure (506): n=A,T,C or G
  unsure (544): n=A,T,C or G
ggctgaggcaggagaanngcgtgaacccgggaggtggaggttgcagtgagccgagattgcgccactgcactccagcctgggcgacagagcgagactgtctcaaaaaaaaaaaaaaaaaaaaaaaagaacggaatgtactgganatgtatttgataaccaaggttttaggtaaattttcaccagtattagttctatttgcaaactgaaaaatgttgtaggcttaatataaaataaccacattagtgaacattatatctcttanaanaaaggccatattttgctcctgcttctgtaaaaatattatttgtttgaaggggaaataatggtagtgtgacctttcacttaattcctactcccttaatgtgagagagacaaaatgagctgaagaaggaaaattctggagttacactccacaaccttgaacatactgacggacatctctgttttgacaacgatttctccatgccacccatgctctaatgccttgtggatcacggacaaccctntttgcacaagctacagcatcagcgatgttatcttgcancaaagcactgcaggataaatgacaggcatta

SEQ ID NO: 8819 - DNA, 161 bp, Homo sapiens
  unsure (70): n=A,T,C or G
  unsure (104): n=A,T,C or G
  unsure (115): n=A,T,C or G
  unsure (116): n=A,T,C or G
atcatgaaaatgggtctgttgtgcgaagtgtctgccgctgtgcctgctgtgttatttttaactgatctantggggctcggccccatgtttgaaggccaaaaacntgtcggtgttnnttttttgtttttgttttagtaatgtgtaatttatccttgataacg

SEQ ID NO: 8820 - DNA, 620 bp, Homo sapiens
  unsure (19): n=A,T,C or G
  unsure (589): n=A,T,C or G
  unsure (590): n=A,T,C or G
tccagatttttgaaaaatncaatgtctaatggttatgaagaccacatggccgaagactgcaggggtgacatcgggagaacgaatttgatcgtcaactacctccctcagaacatgacccaggatgagttacgaagcctgttcagcagcattggtgaagttgaatctgcaaaacttattcgggataaagtagcaggacacagcttgggctatggctttgtgaactacgtgaccgcgaaggatgcagagagagcgatcaacacgctgaacggcttgaggctccagtcaaaaaccattaaggtgtcgtatgctcgcccgagctcagaggtgatcaaagacgccaacttgtacatcagcgggctcccgcggaccatgacccagaaggacgtagaagacatgttctctcggtttgggcggatcatcaactcgcgggtcctcgtggatcagactacaggtttgtccagaggggttgcgtttatccggtttgacaaacggtcggaggcagaagaggcaattaccagtttcaatggtcataaacccccaggttcctctgagcccatcacagtgaagttttgcagccaaccccaaccannaacaaaaacgtggcacttcctctcgcacct

SEQ ID NO: 8821 - DNA, 571 bp, Homo sapiens
  unsure (17): n=A,T,C or G
  unsure (279): n=A,T,C or G
  unsure (298): n=A,T,C or G
  unsure (302): n=A,T,C or G
  unsure (530): n=A,T,C or G
  unsure (538): n=A,T,C or G
ctgggcacagtggctcncacctgtaattccagcactttgggaggccaaggcgggtggatcacctgaggtcaggcattcgagaacagcctggcccacatggcgaaaccccatctctactaaaaatacaaaaattagcccggtatggaggcatgtgcctgtaatcccagctacttgggaggctgaggcaggagaatggattgaacccaggaggcagaggttgcagtgagccaagattgcaccattgcactccagcctgggcaacagaacaagactccatcnaaaaaaaaaaaaaaaaaangaangaaagaagaaaagaaaattagccaggtgtggttgcatgcacctgtagtcccagcactttgggaggccaaggcaggaggatcaatcaaggctaggagtttgagactgcagaaagaaaccctgtctctaaaaaaaaggtccaggtaatttcagggtccagctccaccacaagcgcagctccaggggctgttgagttttgcctttatcattccaagtagtccctgctccanaccaagtnccaccatctggcagtcaggtcagtccaaccaca

SEQ ID NO: 8822 - DNA, 444 bp, Homo sapiens
  unsure (19): n=A,T,C or G
  unsure (20): n=A,T,C or G
  unsure (21): n=A,T,C or G
  unsure (342): n=A,T,C or G
  unsure (414): n=A,T,C or G
gtttctgctcgctcaaccnnnttgtcgtgttgccctcgcttctcagatccccgccggaagtgaagagagcaagcagatttgaacctatctgctttcaagctggtcatcatgatgaaacttagacacaaaaataaaaagccaggtgaaggttccaagggccacaagaagataagttggccctaccctcagcctgcaaagcaaaatgggaagaaagcaacctccaaagtgccctccgcacctcattttgttcaccccaatgatcatgccaatcgagaggctgaattaaagaagaagtgggttgaggagatgagggagaagcagcaagccgcccgggagcaaganagacaaaaacgcaggaccattgagagctactgtcaggatgtcctaagacgccaggaggagtttgagcataangaggaagttttgcaggaattaaatatgttt

SEQ ID NO: 8823 - DNA, 525 bp, Homo sapiens
  unsure (18): n=A,T,C or G
  unsure (19): n=A,T,C or G
  unsure (20): n=A,T,C or G
ccactacgataagcaggnnnctgggttttgtagtgagcttgctccttaagttacaggaactctccttataatagacacttcattttcctagtccatccctcatgaaaaatgactgaccactgctgggcagcaggagggatgatgaccaactaattcccaaaccccagtctcattggtaccagccttggggaaccacctacacttgagccacaattggttttgaagtgcatttacaaggtttgtctattttcagttctttactttttacatgctgacacatacatacactgcctaaatagatctctttcagaaacaatcctcagataacgcatagcaaaatggagatggagacatgatttctcatgcaacagcttctctaattataccttagaaatgttctcctttttatcatcaaatctgctcaagaagggctttttatagtagaataatatcagtggatgaaaacagcttaacattttaccatgcttaagttttaagaataaaataaaaattggaaataattgg

SEQ ID NO: 8824 - DNA, 624 bp, Homo sapiens
  unsure (19): n=A,T,C or G
ctgaaaatcttttagtaanagctttaaagatgagcccatgaattcactttaaatttcaccagttaaattaggtcaaatggaaggaactcaaatgagtattgcccaatcagagcccattatttgtaagtcatcagtaaccttaaaactccacttagacctaattattgaaaacttgcatataatgaagtgaaagaatttccattcatcaacctctcaatcccaggttttcaaagaaaaacctatctaaggaatacttaccaaaatcagataagaaaatttaaacctgcatagttatcagatttgttccactacaaccagtctgcatacagttacacatcaattcgttctgtatacactctagaactgaacagaacaaagtttagcatagaaaagctgtaagaaacaggttcctaattacggaagttgcaaagttcaaaagggtatgaaaaaaactaatgtaaattcgatacttccttcgtttcaaagaaatagactttctgtaaaaatatatacaatttttacaaatacatttacaagctgtcttaagaattgaggatatccatattcataactaattactgagccttccgtcaagtattattggtgataaactaggctaataaa

SEQ ID NO: 8825 - DNA, 619 bp, Homo sapiens
  unsure (16): n=A,T,C or G
  unsure (587): n=A,T,C or G
  unsure (590): n=A,T,C or G
ggcgcctcctgtcacncctgtatcgggggcaccaacgtgcgtgctgaggtgcagaaactgcagatggaagctccccacatcatcgtgggtacccctggccgtgtgtttgatatgcttaaccggagatacctgtcccccaaatacatcaagatgtttgtactggatgaagctgacgaaatgttaagccgtggattcaaggaccagatctatgacatattccaaaagctcaacagcaacacccaggtagttttgctgtcagccacaatgccttctgatgtgcttgaggtgaccaagaagttcatgagggaccccattcggattcttgtcaagaaggaagagttgaccctggagggtatccgccagttctacatcaacgtggaacgagaggagtggaagctggacacactatgtgacttgtatgaaaccctgaccatcacccaggcagtcatcttcatcaacacccggaggaaggtggactggctcaccgagaagatgcatgctcgagatttcactgtatccgccatgcatggagatatggaccaaaaggaacgagacgtgattatgagggagtttcgttctggctctancanagttttgattaccactgacctgctggacc

SEQ ID NO: 8826 - DNA, 620 bp, Homo sapiens
  unsure (17): n=A,T,C or G
  unsure (18): n=A,T,C or G
  unsure (574): n=A,T,C or G
  unsure (607): n=A,T,C or G
ctgctcgggaggctganncacaagaatcgcttgagccagggaggtggaggttgcagtgagctgagatcacatcattgcactccagcctgggcaacgggcgagactctgtctcaaaaaaaagaaagaaagaaaaggtacatgtatatatttgtcctgcattatgttttttacttgatataaatgtatttttactgtgatagtccaagtgccctggggggcaggtgtgctctatgtggttcttcttccattggagagctggcgtagagatctgcagtgttcacaaggatgttggtttggagatgtctgctgctaggacctggggtgtgtgactcagtccatatgagagggacatctgggtggaggagtaaattcctgtgctctgaaatgccacttggtagctctggacaatgaaggacaattgactcaagggtgcctggcttctgctgctgctgggaaaaaattcagtttatagcattcctgcacctcccaaagtagataacctggaggtcattcagttaacaactgtccctgaggactcagttttgggggaggggttatctgggagaagctttancctgttctgagccattaggagacattagtgaanttggagcactgga

SEQ ID NO: 8827 - DNA, 254 bp, Homo sapiens
  unsure (17): n=A,T,C or G
  unsure (18): n=A,T,C or G
  unsure (19): n=A,T,C or G
  unsure (33): n=A,T,C or G
  unsure (58): n=A,T,C or G
  unsure (96): n=A,T,C or G
  unsure (176): n=A,T,C or G
  unsure (207): n=A,T,C or G
  unsure (221): n=A,T,C or G
  unsure (226): n=A,T,C or G
caagctttttttttttnnntttttttttttttngcttattaaactagttttactttancaccgttcttagtggagcaggattcttgatcatggggnggaattttgtgtatctgggcttcatgggatgcataaaattttccagttggtaagcagcaggtgccgagggtctggatcanaaaaaaaggcaggcagccgggttcccactcnccttccatgagctntccgnagctcaccggccatcacttgaagcaaac

SEQ ID NO: 8828 - DNA, 300 bp, Homo sapiens
  unsure (8): n=A,T,C or G
ccattcanacaattgcccccttgtgggaatgcgggaatgaatggtacagtggacaccccagcaccattgacgttataaacatgtaaatgaaacacattagggcagacaatcaattgtctgtgagcattgcaaacctgcactccctctctctgtgacaggcacaaaatagtgtctaccttgggaagccacggtgctgagaggaaaaggacaaagaatttcctttcacacagaagaaaatgcaccttaaaagccttggaagaatgcagatgacaaaaactgttgcaaggaaaagaatctccc

SEQ ID NO: 8829 - DNA, 616 bp, Homo sapiens
  unsure (15): n=A,T,C or G
  unsure (604): n=A,T,C or G
  unsure (605): n=A,T,C or G
  unsure (609): n=A,T,C or G
ccagtggaatgatgncccctgcaattaccatctcacctatacgtgcaagaaaggaacagtcgcttgcggccagccccctgttgtagaaaatgccaagacctttggaaagatgaaacctcgttatgaaatcaactccctgattagataccactgcaaagatggtttcattcaacgtcaccttccaactatccggtgcttaggaaatggaagatgggctatacctaaaattacctgcatgaacccatctgcataccaaaggacttattctatgaaatactttaaaaattcctcatcagcaaaggacaattcaataaatacatccaaacatgatcatcgttggagccggaggtggcaggagtcgaggcgctgatccctaaaatggcgaacatgtgttttcatcatttcagccaaagtcctaacttcctgtgcctttcctatcacctcgagaagtaattatcagttggtttggatttttggaccaccgttcagtcattttgggttgccgtgctcccaaaacattttaaatgaaagtattggcattcaaaaagacagcagacaaaatgaaagaaaatgagagcagaaagtaagcatttccagcctatcnnattnctttagt

SEQ ID NO: 8830 - DNA, 396 bp, Homo sapiens
  unsure (16): n=A,T,C or G
  unsure (18): n=A,T,C or G
  unsure (19): n=A,T,C or G
  unsure (295): n=A,T,C or G
ctgactcaaggaccancnnatctttcttggctgctgtgttttctacccagcaaagggtccggtgggaaccccctcagccaaatgggagccactgacttctgtggggcccagaatctgactcaggcccagggaaatctgattcccacgtcaaagctcaggactcggagctgcactggttccgaacacagagcaggcataaagttctgatgccagaagaaggcaggaaactccaacgagctttaatcactctcccatcacgaacagctctagtgacagcttggcctttctatcccangagttcaaagagtttccatcgttcattctcacaaaggcccatgtcccctctgcctcgttcctgcttcactttattgaagtaactgtgaccccagatagaat

SEQ ID NO: 8831 - DNA, 162 bp, Homo sapiens
  unsure (7): n=A,T,C or G
  unsure (27): n=A,T,C or G
  unsure (55): n=A,T,C or G
  unsure (81): n=A,T,C or G
  unsure (132): n=A,T,C or G
  unsure (134): n=A,T,C or G
  unsure (140): n=A,T,C or G
  unsure (142): n=A,T,C or G
  unsure (144): n=A,T,C or G
  unsure (150): n=A,T,C or G
ccaccantgagttactgggcccacatntgcctgcaagagggggaggggaattcangtaacccacaagaggggataaaagtncggggaagaaatctcctgtcaaggagtttgtttttgcagtggatcctctgnantgagantngntgtctntacaatatcatt

SEQ ID NO: 8832 - DNA, 432 bp, Homo sapiens
  unsure (15): n=A,T,C or G
  unsure (17): n=A,T,C or G
  unsure (319): n=A,T,C or G
  unsure (360): n=A,T,C or G
ctggcattggtctananctttataaggccattcagcgagggaccatcaagtgcaactttgcgggggttgccttgggtgattcctggatctcccctgttgattcggtgctctcctggggaccttacctgtacagcatgtctcttctcgaagacaaaggtctggcagaggtgtctaaggttgcagagcaagtactgaatgccgtaaataaggggctctacagagaggccacagagctgtgggggaaagcagaaatgatcattgaacagaacacagatggggtgaacttctataacatcttaactaaaagcactcccacgtntacaatggagtcgagtctagaattcacacagagccacctantttgtctttgtcagcgccacgtgagacacctacaacgagatgccttaagccagctcatgaatggccccatca

SEQ ID NO: 8833 - DNA, 318 bp, Homo sapiens
ctgtcattccggtcatcacacaaccaatgttttcagttatcttgaataagtgagtcactgtgctggaatccaataatttgtcaggtactttcttctgtgtgacaattactgcacagtctttccctctgacagctactgatgtaaggccaccctggttaatagccttaaaagcatattctacttggtagagccgaccctcgggtgaaaaaatggtaatgtggcggtcaaaaccggcgctggaaccacgggacatgttggtacaagcactactttaaacacaatccctgggccccgtagctcccgcaccaggcacacaag

SEQ ID NO: 8834 - DNA, 560 bp, Homo sapiens
  unsure (412): n=A,T,C or G
ccagtgccattggtggcctctgaacaggcgctgggaaggtgttagtatgtggggctcttaccaatggagggaccaggttaggctgagagagaatctggggtgcaaactgtgtaggaaatggttgtgtcattctcacagtggcaggggctgactggaactgcttctggtagacaatgctgttcattttgctggactggctgttcggacttgtagaagtagcccggaagggactagatgttggtgtggtgcttctaccagcgattggaggtgtgcctggttttatatcaatgccacttccaaaggcttttagttccatttcagacatttttcctgtggttgcaatcatgctatgctgtgttccagcaggaattaatcctctgaaaggctggcttacttgtgcaggacgactcanactctgagcctgtgcttggggagtggtatgctgtaatgggggctgaagagtctgaggcaaagcaattagaggttgccctgtagatccaaaattaggcaaggaaagctgggatgctggtaaaggtactgtaacctgctggagagcactt

SEQ ID NO: 8835 - DNA, 254 bp, Homo sapiens
  unsure (16): n=A,T,C or G
  unsure (18): n=A,T,C or G
  unsure (19): n=A,T,C or G
  unsure (132): n=A,T,C or G
  unsure (142): n=A,T,C or G
  unsure (145): n=A,T,C or G
  unsure (151): n=A,T,C or G
  unsure (178): n=A,T,C or G
  unsure (231): n=A,T,C or G
  unsure (236): n=A,T,C or G
  unsure (239): n=A,T,C or G
  unsure (244): n=A,T,C or G
  unsure (246): n=A,T,C or G
ggaaaatccggattgncnnccagggagagaaaagaggcacacccggagctggtatccctcacctccaccactcagcaaggcgccggacagatatccggagggcactctgcctctgccggggggtttttttanaaaaggaatngcntagaanatacagcaagagggaactccacaacancaaaagtgttccatatcggaaaagccaaggttgtcatgttttgtttaaaaaanaaaancgncaaancncaaaacct

SEQ ID NO: 8836 - DNA, 347 bp, Homo sapiens
  unsure (17): n=A,T,C or G
ctgctagagatgtgcanggatgtctgtgaagccatggaatacctggagtcaaagcagttccttcaccgagacctggcagctcgaaactgtttggtaaacgatcaaggagttgttaaagtatctgatttcggcctgtccaggtatgtcctggatgatgaatacacaagctcagtaggctccaaatttccagtccggtggtccccaccggaagtcctgatgtatagcaagttcagcagcaaatctgacatttgggcttttggggttttgatgtgggaaatttactccctggggaagatgccatatgagagatttactaacagtgagactgctgaacacattgcccaagg

SEQ ID NO: 8837 - DNA, 449 bp, Homo sapiens
  unsure (16): n=A,T,C or G
cctggctcaacaaaanggctggggattggccctgaaaggagagagctgactgtcctggctgatggacaggagatcctcttagcactaccctaaggcaggcagttgggcattggtgtagacaacaggaaagtccaggctatagccgtactcaaaaacctttctgttccctttctgccagccctagggattgagtccacattcagcacaggactctctgggtacagctctctttaggaagacacaaattgcatggtgaagtcagttatatcctggccgcctttggtccctcccaggaagacgggcatgttttctgcttgagaggtgctgatgtaccagttggggaactgggcagactcaaattccagcttgttattgatttctatcttgttgaagacaaatcgcttttccatcttcttctttgggtaatttttgggatctacactctccag

SEQ ID NO: 8838 - DNA, 616 bp, Homo sapiens
  unsure (16): n=A,T,C or G
ctgtgagcccagctangacctcagaggggctgcgtctctgcactgcacgccccagggagactggagccctgaagcccctagatgtacagtgaaatcctgtgatgacttcctgggccaactccctcatggccgtgtgctacttccacttaatctccagcttggggcaaaggtgtcctttgtttgcgatgaagggttccgattaaaaggcaggtctgctagtcattgtgtcttggctggaatgaaagccctttggaatagcagtgttccagtgtgtgaacaaatcttttgtccaaatcctccagctatccttaatgggagacacacaggaactccctttggagatattccctatggaaaagaaatatcttacgcatgcgacacccacccagacagagggatgaccttcaacctcattggggagagctccatccgctgcacaagtgaccctcaagggaatggggtttggagcagccctgcccctcgctgtgaactttctgttcctgctgcctgcccacatccacccaagatccaaaacgggcattacattggaggacacgtatctctatatcttcctgggatgacaatcagctacatttgtgaccccggctacctgtta

SEQ ID NO: 8839 - DNA, 510 bp, Homo sapiens
tctaaaggtaaaccaatctttgacaatgccaatagcagtgtcaatgttcctaaatgttggctgtatctatctacttactcattgtattcttgaggtttctttcctttggtttctatgatattccacatccctctcttttcattccattgtgtgagttctctctgtggatcttttgttagctcctcttattccttcttgcctatctgagtttcctgaaattaccttcaaatcatgtctcgaaagatgttctaaagagacctttgaataagaacaacatttgtcccattaataaatggtgggagtttcatatatctgtttctttttctcttctttcctctttgccttgtccaaaagagtgggaactgagcagtacagtcataaattaattttaatatcttaacttaggcatcagtacactggctattgttccttaatacatttaacacatagtcattgactgctgattatgtgccaagggctgtgcttggcactggggataaagaagttatt

SEQ ID NO: 8840 - DNA, 574 bp, Homo sapiens
  unsure (567): n=A,T,C or G
ctggggtgggcttctcctactccgatgacaagttttatgcaactaatggcactgaggtcgcccagagcaattttgaggcccttcaagatttcttccgcctctttccggagtacaagaacaacaaacttttcctgaccggggagagctatgctggcatctacatccccaccctggccgtgctggtcatgcaggatcccagcatgaaccttcaggggctggctgtgggcaatggactctcctcctatgagcagaatgacaactccctggtctactttgcctactaccatggccttctggggaacaggctttggtcttctctccagacccactgctgctctcaaaacaagtgtaacttctatgacaacaaagacctggaatgcgtgaccaatcttcaggaagtggcccgcatcgtgggcaactctggcctcaacatctacaatctctatgccccgtgtgctggaggggtgcccagccattttaggtatgagaaggacactgttgtggtccaggatttgggcaacatcttcactcgcctgccactcaagcggatgtggcatcaggcactgntgcgctc

SEQ ID NO: 8841 - DNA, 222 bp, Homo sapiens
  unsure (8): n=A,T,C or G
  unsure (17): n=A,T,C or G
  unsure (19): n=A,T,C or G
ttggcttntaattcgcncntgtacttccttttttgacaataaaagagtcaagatagcaccgaggccaggagaaagggaacgtgtaagtttttatatatacagtttccaagccaacttcgggaagccttaacctttttacggggtgggggtggggaggtaaaaagttgtgatctctgagaaaataaccgccactactctggaagtgttcatcagcagttatac

SEQ ID NO: 8842 - DNA, 541 bp, Homo sapiens
  unsure (17): n=A,T,C or G
  unsure (18): n=A,T,C or G
  unsure (19): n=A,T,C or G
tataaactgtggacaannncctctgccgatggttttcaaggacctacttttgtcctgaccacttacaagcaaactctccacacatatgaaaactttgatttggaatatgaagagctatcagaatacaaattgtggttttcaatgtcatgcctgtggttattttaatagcatacccaaaagggtgttcttttatcttaagtatttacaataccttcagagtttcagttctttattttataaagcaatgaattttaataagaatattgaaatttcttccatttgaccttctgagagaaatggaaagaactccagcttgggtagcacagcaagactccatctctacaaatttttttttaaaaattagccaggcgtgcagcacacaccagtggtcccagctaccagggaggatgaggtaggaggattgaggatcgcctgagcccaggagttcgaggttacagtgagctcgaggttacagtaactgcagtggtgccactgcactccagcctgagctggagagctggagagcaatactccatcccta

SEQ ID NO: 8843 - DNA, 452 bp, Homo sapiens
  unsure (9): n=A,T,C or G
  unsure (18): n=A,T,C or G
  unsure (20): n=A,T,C or G
  unsure (21): n=A,T,C or G
  unsure (313): n=A,T,C or G
ccttttacntgctgatancnnaagcaatctgtgtgcatgtgtacatatgcatctgttttcagggaaagaaaagctgttaaagccaattaaggttatgaattcttgctactactttaatattaaacctttaagtgaaaatttattgaacactattacaaatgtggcaaactgacatagctggtttactgcacaaactttaatgtcaaagggattagatcagagctccagtctcacttactgggcctataacattgtgcagggcacttatctcacctcaggaaaatggaagtaactgcttcattttacagaggtnttaaatgaaagaaatgagaaaactataaaccaacattgaagcctgaattattgcttagtatttaaagtctagtacaatttgcaatgtttttaataaaaaaactcattgataggtgtatttttacagtgtatctaaaagc

SEQ ID NO: 8844 - DNA, 587 bp, Homo sapiens
  unsure (17): n=A,T,C or G
  unsure (18): n=A,T,C or G
  unsure (19): n=A,T,C or G
  unsure (430): n=A,T,C or G
  unsure (574): n=A,T,C or G
gggctgtctggcaggcnnnaaactacattcagttgagtctgcaagactgggaggaactggggtgataagaaatctattcactgtcaaggtttattgaagtcaaaatgtccaaaaaaatcagtggcggttctgtggtagagatgcaaggagatgaaatgacacgaatcatttgggaattgattaaagagaaactcatttttccctacgtggaattggatctacatagctatgatttaggcatagagaatcgtgatgccaccaacgaccaagtcaccaaggatgctgcagaagctataaagaagcataatgttggcgtcaaatgtgccactatcactcctgatgagaagagggttgaggagttcaagttgaaacaaatgtggaaatcaccaaatggcaccatacgaaatattctgggtggcacggtcttcanagaagccattatctgcaaaaatatcccccggcttgtgagtggatgggtaaaacctatcatcataggtcgtcatgcttatggggatcaatacagagcaactgattttgttgttcctgggcctggaaaagtagagataacctacanaccaagtgacgga

SEQ ID NO: 8845 - DNA, 573 bp, Homo sapiens
  unsure (18): n=A,T,C or G
  unsure (19): n=A,T,C or G
gctgtccctgatgccgtnnaaagcagatactctagaacggaaggctcccttgatggaacttagacagcaaggccagatgcacatccctggaaggacatccatgttccgagaagaacagatgatccctgtatttcaagacctctgtgcacttatttatgaacctgccctgctcccacagaacacagcaattcctcaggctaagctgccggttcttaaatccatcctgctaagttaatgttgggtagaaagagatacagaggggctgttgaatttcccacataccctccttccaccaagttggaacatccttggaaattggaagagcacaagaggagatccagggcaaggccattgggatattctgaaacttgaatattttgttttgtgcagagataaagaccttttccatgcaccctcatacacagaaaccaattttcttttttatactcaatcatttctagcgcatggcctggttagaggctggttttttctcttttcctttggtccttcaaaggcttgtagttttgggtagtccttgttctttggaaatacacagtgctgaccagacagcct

SEQ ID NO: 8846 - DNA, 547 bp, Homo sapiens
  unsure (16): n=A,T,C or G
ctgagatgccccttcncttctgatgggttaaataagctgggaaattacccgagaagaccccggtaccacagtgtaaagcccaacgaaggggttgtttaatggtccaggggatacagaggctttaagaaacgtttccttaacgctaattcttatctggttaaacaaaacatagcaaaacatccccgatccgctcggcagaccatacacacccagcgacggcacttgatagttaatggggtttgttttaagcagatagaaaattttaagggagtcgaatcttgtgttgaatgcgttcgtgttgaatttgggccagtgtttccttgaagatcaaatgcaggttgcattttcctattgtttgtttaacagattgataggacaaactgaattagacttttcttcctgatgattcttggctcttctgcgctattattttaaaattccacgcctagattcatctatgctaataaagatgttgactttaagctttcaatttatagatgtagttgattaatatggggtatctgttttaaagagctttgttaagtgg

SEQ ID NO: 8847 - DNA, 607 bp, Homo sapiens
  unsure (16): n=A,T,C or G
  unsure (17): n=A,T,C or G
ggagaacctgatcatnnattctgaactcaaagacgacttgcttttgtatcaggacgaggaggcgctgaacgactccattatttctggaacactgccacggaaatgcaagaaggagctcctggccgtgaagctaaggaaccggccaagcaaacaggaactagaagaccggaacattttccccagaaggattgatgaagaaagacaggagatccggcagcagatcgagatgaagctttccaaacggctgagccaaagacctgccgtggaagagctggagagaagaaatatcttgaaacaaaggaatgatcagacagagcaggaagaaagaagagaaatcaagcaaagattgacaagaaagcttaatcagagacccactgttgatgaattaagagacagaaaaattctgatacgattcagtgattacgtggaagtagcaaaagcgcaggactatgacaggagggcagacaaaccctggacgagactgtcagcagcagataaggcagcaattcgtaaagaattaaatgagtacaaaagtaatgaaatggaggtacatgcatcaagcaagcacttgacaagattccacagaccatagagattttcttctgag

SEQ ID NO: 8848 - DNA, 572 bp, Homo sapiens
  unsure (10): n=A,T,C or G
  unsure (11): n=A,T,C or G
  unsure (426): n=A,T,C or G
  unsure (538): n=A,T,C or G
  unsure (565): n=A,T,C or G
gaaggcaccnncttacagatggtctgtatcatcttcctgtgagtgctctcagtctgaatgatcatcttcaatattctatctagtgatggagtgagaaaattctcctgaactctgggcaggaagttcatattgctcagggtgagccaccatgataaaaataactcacacaggctaattacaattaatctaggctcttgacctttaaaaaatgtatataatgtttacatatgtttataatgtcacgccatttatttcatttaaaattttaaatgattttatctttggtcctctcttacaacttattcttggtacaacttattctttgtactataacagcagagatgagtaattgggacagactagcctccaaagcataaacttatttatgatttggccctttacagtaaaagtctgctcatcccaggntttgcttgtcaatttatatactggcgtttgttcctgatcctatttatttatttctggcatccaactctggtagtttctttctgaatcagtttaatgaagtttgtaaatgatngtaattaaacgttatttattacttttnatttttt

SEQ ID NO: 8849 - DNA, 582 bp, Homo sapiens
  unsure (14): n=A,T,C or G
  unsure (16): n=A,T,C or G
  unsure (17): n=A,T,C or G
  unsure (450): n=A,T,C or G
  unsure (517): n=A,T,C or G
ccactgtgaaaaancnnccccctcaaaacttcaggagaatgtatataataaatgaaggtacaatttcataccttcacaggattattgagaaggtcaaattacataacagatatgaaagcactgtgtaaactatgcggactatgctgcaccaaataactgtaaagaattattaactagactgtaaatgccttgagggcaaggaatgcatctgcaacgggtatttgtgaagtacttgacagtttgctaaggacttctgtggattttcctcatatgctactcataacaaccctggaaggtaaggggaattgttatcccaaattccaaataaagacactgcaggtcagacatcacacaggtggtaaatagcaattctggtacttactttagatattctgctacaggcttgctattcaaagtgtggtatgtagaccagcaacattgactctctgngctatctttcttttttataaactcggaattatttcaaaataagaagtttctaacaaaagagattcanaagagtcaaacccttgggtgtgaaaaagttttaggaagactttcctgaatttatttttgcctata

SEQ ID NO: 8850 - DNA, 466 bp, Homo sapiens
  unsure (14): n=A,T,C or G
  unsure (16): n=A,T,C or G
  unsure (17): n=A,T,C or G
  unsure (91): n=A,T,C or G
  unsure (349): n=A,T,C or G
ctgtctaatccctncnngaactgtttatagaagcttgagaatggggtaaaaatttctgctagcaaaatcaagttctttttgaaattttatnagtaatccagaatttagtagtccatgccttctcactcagcatttagaaataaaaatgtggtttcttaaacgtatatcctttcatgtatatttccacatttttgtgcttggatataagatgtatttcttgtagtgaagttgttttgtaatctactttgtatacattctaattatattatttttctatgtattttaaatgtatatggctgtttaatctttgaagcattttgggcttaagattgccagcagcacacatcanatgcagtcattgttgctatcagtgtggaatttgatagagtctagactcgggccacttggagttgtgtactccaaagctaaggacagtgatgaggaagatggcagtggacctcggccg

SEQ ID NO: 8851 - DNA, 340 bp, Homo sapiens
  unsure (9): n=A,T,C or G
  unsure (10): n=A,T,C or G
  unsure (11): n=A,T,C or G
  unsure (270): n=A,T,C or G
ggaatgacnnnagacgtggctggaaagctggggccagatggcggagactcctcagctccacgttaacaacgtgctcccttggcaagccgtacagatcctttgaaggattttgagcagagaaatgacaagtttatactagaaacaagcagcatggaaggtaggctgcctgcatggagtctggaggaggagagcagcgcagagaatagtgtaaattcttcctgcaagtagtattgaggaggtacaaatgggaggatagaactggatttaaanagttttcagagagaagaaagtcaagtgaaataggacaaagagtccaaagtcagtccgtggtctccattcg

SEQ ID NO: 8852 - DNA, 492 bp, Homo sapiens
  unsure (468): n=A,T,C or G
taccaagacctgctcaatgttaagatggcccttgacattgagattgccacctacaggaagctgctggaaggcgaggagagcaggatttctctgcctcttccaaacttttcctccctgaacctgagggaaactaatctggattcactccctctggttgatacccactcaaaaaggacacttctgattaagacggttgaaactagagatggacaggttatcaacgaaacttctcagcatcacgatgaccttgaataaaaattgcacacactcagtgcagcaatatattaccagcaagaataaaaaagaaatccatatcttaaagaaacagctttcaagtgcctttctgcagtttttcaggagcgcaagatagatttggaataggaataagctctagttcttaacaaccgacactcctacaagatttagaaaaaagtttacaacataatctagtttacagaaaaatcttgngctagaatactttttaaaaggtat

SEQ ID NO: 8853 - DNA, 304 bp, Homo sapiens
  unsure (233): n=A,T,C or G
ttgtatatctcgttagtaatgtacatgctcttcaggttctagggctcctgttaggggagggagaaatgttgaatcaagagggaaaacaactactatgatttataaacatattttaatgtaaaaatttgcatttaaaaggagtggccctgttttctgtgttaaaaccccatttggtgctattgagtttgttctttattcttttatcccagtgaaaattgttgatcttgctgtanggaaaaattaaactctttgaatctccaaacaaggaagtttcagcattcccttatggatcagaggaacctta

SEQ ID NO: 8854 - DNA, 379 bp, Homo sapiens
  unsure (175): n=A,T,C or G
  unsure (196): n=A,T,C or G
  unsure (263): n=A,T,C or G
  unsure (300): n=A,T,C or G
  unsure (312): n=A,T,C or G
  unsure (323): n=A,T,C or G
  unsure (374): n=A,T,C or G
ggtcatgatgcagaagctactcaaatgcagtcggcttgtcctggctcttgccctcatcctggttctggaatcctcagttcaaggttatcctacgcagagagccaggtaccaatgggtgcgctgcaatccagacagtaattctgcaaactgccttgaagaaaaaggaccaatgttncgaactacttccaggtgaatncaacaagatcccccgtctgaggactgacctttttccaaagacgagaatccaggacttgaatcgtatnttcccactttctgaggactactctggatcaggcttcngctccggctccngctctggatcnggatctgggagtggcttcctaacggaaatggaacaggattaccaactagtnggacg

SEQ ID NO: 8855 - DNA, 491 bp, Homo sapiens
  unsure (9): n=A,T,C or G
  unsure (10): n=A,T,C or G
  unsure (18): n=A,T,C or G
  unsure (19): n=A,T,C or G
  unsure (20): n=A,T,C or G
  unsure (437): n=A,T,C or G
  unsure (459): n=A,T,C or G
  unsure (460): n=A,T,C or G
  unsure (463): n=A,T,C or G
ctggttctnnaatcctcnnntcaaggttatcctacgcagagagccaggtaccaatgggtgcgctgcaatccagacagtaattctgcaaactgccttgaagaaaaaggaccaatgttcgaactacttccaggtgaatccaacaagatcccccgtctgaggactgacctttttccaaagacgagaatccaggacttgaatcgtatcttcccactttctgaggactactctggatcaggcttcggctccggctccggctctggatcaggatctgggagtggcttcctaacggaaatggaacaggattaccaactagtagacgaaagtgatgctttccatgacaaccttaggtctcttgacaggaatctgccctcagacagccaggacttgggtcaacatggattagaagaggattttatgttataaaagaggattttccnaccttgacaccaggcaatgtanntangcatattttatgtaccatggttatatga

SEQ ID NO: 8856 - DNA, 469 bp, Homo sapiens
  unsure (443): n=A,T,C or G
  unsure (463): n=A,T,C or G
ttagttttagctcttgtattcatgtctgtaatcaattgaagttaatttttaatatagtatgtgttgggagtccagcttcattgttttgcatgtatctatgcaattgacccaaagtgatttgttgaaaaatattattttctgatggtatggtcctgacacccttgtagaaattcaattgaagatatatgtatgagtttacttctgcagtctcaattctattctattggtctaaatgtttatctttatgccagtaccagcctgttttggttattttagttttgtaataaaatagacaaacatttggccgattaatcaagacaaaaagaaaagtatatagaaataatattatgaaagaaaagggggagcatattgaaaaacaccataaagattaaaaagattaagggacagtgttaacaatttatgccaataggttttgataattnatattttgctaggaatttgnctattt

SEQ ID NO: 8857 - DNA, 262 bp, Homo sapiens
aaaaatagaagatgaatcattgattgaatagttataaagatgttatagtaaatttattttattttagatattaaatgatgttttattagataaatttcaatcagggtttttagattaaacaaacaaacaattgggtacccagttaaattttcatttcagataaacaacaaataattttttagtataagtacattattgtttatctgaaattttaattgaactaacaatcctagtttgatactcccagtcttgtcattgccag

SEQ ID NO: 8858 - DNA, 418 bp, Homo sapiens
  unsure (17): n=A,T,C or G
ctgttaaatacctcccngcatttttttttcctgatttaatattgctatgaacaggaaagtgtgtaaaagtaaaaagtgtatactatttacagatttaaagctttctttgaccttgtcaagggttaagcgactcatttgcatttagtataatgatatgcaaatcttttactttgatgtgtgaaacttctgctatctcaaattgacagtatcattattttcagctatgatcatccgtttaagtaaatgttcccataattttgaggtccagatacaaagtgtatttctatggaagcttagtccttggctgattttccatcatgagaagtcttcaggcagattagttataacttcaaagtactgagaaacagagccaagagataaggtcgagctctattgttccagtattctcgggatccag

SEQ ID NO: 8859 - DNA, 509 bp, Homo sapiens
  unsure (16): n=A,T,C or G
  unsure (17): n=A,T,C or G
  unsure (18): n=A,T,C or G
  unsure (461): n=A,T,C or G
gtggagaagagaaaannncagggcaggctggatggcatggctcacacctgtaatcccagcactttgggaggccatggagggaggattgaggccaggagtttgagaccagcctgggtgacattaaaagaccctgtctcaaagaaaacgaaaggagcagggtatatacaaggggtctgccagccttctcagcctttctgtgagaagcgagggtagggtagtacaggagagtggcaggaggtgacactaaaagtaggtctgtgttgatctaacgagtctcaactttactgccaaaactaatgaactaggaaagtttaggcagcaagggccagagatggagtctggacttgtattgcagaaagttcctgtgacggcagcttggagggtgaatgagagtgtgggatggaggggtgaatgggtgtggacagactggaaaaatgactcatgcagggaatgaggaaggnaggagccttgggagactctcaaatccctggcttagcctactgaattgc

SEQ ID NO: 8860 - DNA, 281 bp, Homo sapiens
  unsure (14): n=A,T,C or G
  unsure (15): n=A,T,C or G
  unsure (16): n=A,T,C or G
ctgctcggaggacnnntacagtgagctgctgcaggagatcacagacaacctgacgaagaaggagattcagatagagaagatccatttggacacgtcctccttcatggaggagctgcctggagagaaggaccttgcccacgtggtagagatctatgactttgaaccagcgctcaagacggaggacctgctggcaacgttttctgagttccaagagaaggggttcaggattcagtgggtggatgatactcgcgcactcggcatctttccctgccgggcctcag

SEQ ID NO: 8861 - DNA, 514 bp, Homo sapiens
  unsure (278): n=A,T,C or G
  unsure (448): n=A,T,C or G
  unsure (453): n=A,T,C or G
  unsure (454): n=A,T,C or G
  unsure (465): n=A,T,C or G
tccacatacaatatctgtgtaaaacgatttcctgtagaagtagctttaatggtttttgctctagaataccgtaggtctatccttagagcactcacgccatgctttcttccctgggttttaaacttcatataactttcagaaattggagagcaaaaattttgcttgtcactgcacatcaatataaaaaagcttatttaacttatcaaaacgtatttattgccaaactatgcttttttttgttaattttgttcatatttatcgggatgacaaatccatanaatatattcttttatgttaaattatgatcttcatattaatcttaaaattttgtgacgtgtctttttcctttttttccacagttttaatatattattcttcaacgacattttttgtaactttacacttttttggttattttattttaaaaaaatgaaaaattaatttaaanaaatnncaaaaaactgntggattatttattttagaaattcccccctttgtgttggactgcaaattg

SEQ ID NO: 8862 - DNA, 588 bp, Homo sapiens
gagcattttaaatagtacagtaggctggtatacattaggaaatggactgcactggaggcaaatagaaaactaaagaaattagataggctggaaatgcttactttctgctctcattttctttcattttgtctgctgtctttttgaatgccaatactttcatttaaaatgttttgggagcacggcaacccaaaatgactgaacggtggtccaaaaatccaaaccaactgataattacttctcgaggtgataggaaaggcacaggaagttaggactttggctgaaatgatgaaaacacatgttcgccattttagggatcagcgcctcgactcctgccacctccggctccaacgatgatcatgtttggatgtatttattgaattgtcctttgctgatgaggaatttttaaagtatttcatagaataagtcctttggtatgcagatgggttcatgcaggtaattttaggtatagcccatcttccatttcctaagcaccggatagttggaaggtgacgttgaatgaaaccatctttgcagtggtatctaatcagggagtttgatttcataacgaggtttcatctttccaaaggt

SEQ ID NO: 8863 - DNA, 132 bp, Homo sapiens
  unsure (8): n=A,T,C or G
  unsure (24): n=A,T,C or G
  unsure (35): n=A,T,C or G
  unsure (50): n=A,T,C or G
  unsure (90): n=A,T,C or G
  unsure (106): n=A,T,C or G
  unsure (116): n=A,T,C or G
  unsure (130): n=A,T,C or G
aaacttgnttattatgtacaaatngattcttatantattatttaaatgantgcatttttaaatacaaggctttatatttttaactttaanatgtttttatgtgctntccaaatttnttttactgtttctnga

SEQ ID NO: 8864 - DNA, 581 bp, Homo sapiens
  unsure (9): n=A,T,C or G
  unsure (18): n=A,T,C or G
  unsure (19): n=A,T,C or G
  unsure (20): n=A,T,C or G
  unsure (62): n=A,T,C or G
  unsure (107): n=A,T,C or G
  unsure (117): n=A,T,C or G
  unsure (125): n=A,T,C or G
  unsure (135): n=A,T,C or G
  unsure (141): n=A,T,C or G
  unsure (143): n=A,T,C or G
ctgtgaaanagccaaaannncccaaactaggctgatactcctgtgttgacctgaggtcattntgtgcctgtcaaaccaaataacacattcaatcttttgtatatttngaagactcanaaacccanaaatttttanaacctntntctcactctaattaaaacctactgctctgtcaatgggaaagaatgagtccaaacattctgaaaaccgtacaaatgtgtttacattttagtgggggcttcctgcatctttaacctctttaaattgacataggtaagatcttgtgtaataacacatttgcaaatatgcagatgcattttcaaatgaatataatcctgatttagagaatattaactgactatcatagtagactatggataatactctaataattaattacaggttaacatttttaaaactcaaagcatatgctttaagtttatgctttaagccacgttatgttctacttcagcctaatacaagggagaaatttggagggggccctcctagctttctagtctcattattcccaaattagaaacattaccagcctaacactaactctggggtctaaaatgaag

SEQ ID NO: 8865 - DNA, 498 bp, Homo sapiens
  unsure (17): n=A,T,C or G
  unsure (18): n=A,T,C or G
  unsure (455): n=A,T,C or G
  unsure (463): n=A,T,C or G
  unsure (487): n=A,T,C or G
  unsure (488): n=A,T,C or G
  unsure (489): n=A,T,C or G
ctgtgaggagattcccnntcagacaactttgctgaaagcagcttggaaattcggtgtcgaagggtctgccacgttttcatgcttgcattttgggctccaaattggcactgggaaggggttactgagagcacaaggctgataccaggccctacttttaaacgttcatctacttacaatcctagtatttctctaaaaaccaaaacctctttgaattaacagtttcatgctgtgaatttctagtgggagatcttttccttgatattgacgacacaattttccatgtacttttaaagcagggagtggggaaaagtattttgaggggacattttcatcatcagttcagctttttttttttggttgttgctcttttttgggggggttgggtttgttggtttcactgaaacatttaactacctgtaaaatctaaacatggctgttagtgtcacaccaattcnggacacanaatggctaacactggaagtatgtnnnagagttcca

SEQ ID NO: 8866 - DNA, 231 bp, Homo sapiens
  unsure (9): n=A,T,C or G
  unsure (17): n=A,T,C or G
  unsure (18): n=A,T,C or G
gaaaaacangatggagnnccagggcaaccccaaataccgcgccctctctgagcaaggcgtctgcaccctagagatccggaaacccagcccctttgattctggggtctacatctgcaaggccataaatgtgctgggggaggcatctgtggactgccggctggaggtcaaagcctcagccgcacactgaagagtcacgggaggaggctgtgatgaggagccaggtgctgcagg

SEQ ID NO: 8867 - DNA, 606 bp, Homo sapiens
  unsure (18): n=A,T,C or G
  unsure (556): n=A,T,C or G
cctaagaactgagacttncgacacaaggccaacgacctaagattagcccagggttgtagctggaagacctacaacccaaggatggaaggcccctgtcacaaagcctacctagatggatagaggacccaagcgaaaaaggtatctcaagactaaaggccggaatctggaggcccatgacccagaacccaggaaggatagaagcttgaagacctggggaaatcccaagatgagaaccctaaaccctacctcttttctattgtttacacttcttactcttagatatttccagttctcctgtttatctttaagcctgattcttttgagatgtactttttgatgttgccggttacctttagattgacagtattatgcctgggccagtcttgagccagctttaaatcacagcttttacctatttgttaggctatagtgttttgtaaacttctgtttctattcacatcttctccacttgagagagacaccaaaatccagtcagtatctaatctggcttttgttaacttccctcaggagcagacattcatataggtgatactgnatttcagtcctttcttttgaccccagaagccctagactgagaagataaaa

SEQ ID NO: 8868 - DNA, 550 bp, Homo sapiens
  unsure (18): n=A,T,C or G
ccacactctacttctgcntctgccacctatggggtcgaggcaggtgtggtgccttggctaagtccacagacttctgagaggcccacgctttcttcttctccagaaataaaccctgaaactcaagcagctttaatcagagggcaggattccacgatagcagcatcagaacagcaagtggcagcgagaattcttgattccaatgatcaggcaacagtaaaccctgtggaatttaatactgaggttgcaacaccaccattttcccttctggagacttctaatgaaacagatttcctgattggcattaatgaagagtcagtggaaggcacggcaatctatttaccaggacctgatcgctgcaaaatgaacccgtgccttaacggaggcacctgttatcctactgaaacttcctacgtatgcacctgtgtgccaggatacagcggagaccagtgtgaacttgattttgatgaatgtcactctaatccctgtcgtaatggagccacttgtgttgatggttttaacacattcaggtgcctctgccttccaagttatg

SEQ ID NO: 8869 - DNA, 580 bp, Homo sapiens
  unsure (16): n=A,T,C or G
  unsure (541): n=A,T,C or G
  unsure (549): n=A,T,C or G
  unsure (559): n=A,T,C or G
ctgccgttctcacacngctctacttagactcaatagcagcaccattaagtatctagactttgtctttgctgtgaaaaatgaaaaccgattttatctgaaggaagtgaacatcagcatgtatttggttaatggctccgttttcagcattgcaaataacaatctcagctactgggatgcccccctgggaagttcttatatgtgcaacaaagagcagactgtttcagtgtctggagcatttcagataaatacctttgatctaagggttcagcctttcaatgtgacacaaggaaagtattctacagcccaagagtgttcgctggatgatgacaccattctaatcccaattatagttggtgctggtctttcaggcttgattatcgttatagtgattgcttacgtaattggcagaagaaaaagttatgctggatatcagactctgtaacactaatcaatacgtgatctctgttacaaaagaaaaaagcaagtacaagttccaacatgcaatactggtcaacttaaggtatatttagttgcagtccanctctttanaatgggtggnatgggggatttcaaacttaaa

SEQ ID NO: 8870 - DNA, 312 bp, Homo sapiens
  unsure (14): n=A,T,C or G
  unsure (17): n=A,T,C or G
ctgttctcaacaanccnattttatttttttaatcaggcattgccagaaaattttgtacattaacctggaccagtgatggttctgtaccctctttgctgtgaaacacgacatgagctaaaggcaaagaccggttctcacaaggacaactgcttcaagttaggaaccagaacagtgcatttaaacagtcttcttagatattttcttgcctttcttaaaaaccagcttatttttaatgtagccacgcttccttttggtagtcttctttgacaaatacttctgttttgggaaaatgttggtgactcgaggtttgtg

SEQ ID NO: 8871 - DNA, 244 bp, Homo sapiens
  unsure (14): n=A,T,C or G
  unsure (70): n=A,T,C or G
cctgtctaacctcncctgtggagtctgcgtgggcatcgtgggcagtggggctgccctggccgatgctcanaaccccagcctctttgtaaagattctcatcgtggagatctttggcagcgccattggcctctttggggtcatcgtcgcaattcttcagacctccagagtgaagatgggtgactagatgatatgtgtgggtggggccgtgcctcacttttatttattgctggttttcctgggacag

SEQ ID NO: 8872 - DNA, 437 bp, Homo sapiens
  unsure (10): n=A,T,C or G
  unsure (18): n=A,T,C or G
  unsure (19): n=A,T,C or G
  unsure (21): n=A,T,C or G
  unsure (66): n=A,T,C or G
  unsure (72): n=A,T,C or G
  unsure (92): n=A,T,C or G
  unsure (150): n=A,T,C or G
cctcacgcanaaactagnncngttcatgaaaacccgagatactctgccagcttcttgaggaagcantgttgncacacttttctgagcttcantgattcacacattttgataagacagcatgttctgtgggttaagtacatttaccttttnaaaatatactcccatgaagtatcatggttcagaattacacacttacaaagttaaatggcataaaactactttgtaaaaagtgcctacactctaaaaggtgatttaaaggtttatgacatcttaattcaagtgaatactgaatcagtaggattatagagcaggtgctctaagttagggaatctggagtcagtctctcctttgcttatgtgcaatgtggacccagggatttctcaatttctctgtcagaatttttaacatggtaaaatggctattattatatggaatga

SEQ ID NO: 8873 - DNA, 363 bp, Homo sapiens
  unsure (19): n=A,T,C or G
  unsure (20): n=A,T,C or G
gccgccgcggactccggcnnctttatcgccagagtccctgaactctcgctttctttttaatcccctgcatcggatcaccggcgtgccccaccatgtcagacgcagccgtagacaccagctccgaaatcaccaccaaggacttaaaggagaagaaggaagttgtggaagaggcagaaaatggaagagacgcccctgctaacgggaatgctaatgaggaaaatggggagcaggaggctgacaatgaggtagacgaagaagaggaagaaggtggggaggaagaggaggaggaagaagaaggtgatggtgaggaagaggatggagatgaagatgaggaagctgagtcagctacgggcaagcgggcag

SEQ ID NO: 8874 - DNA, 537 bp, Homo sapiens
  unsure (414): n=A,T,C or G
  unsure (435): n=A,T,C or G
catcaagagatacttcaccctcaagtggttcagcagtttcttcatcaaaggtgttagacaaacccagtaggctaactgaaaaggaacttgctgaggctgcaagcaagtgggctgctgaaaagctagagaaatcagatgaaagtaacttgcctgaaatttctgagtatgaggcgggatccacagcaccattgtttactgaccagccagaggaacctgagtcaaacacaacacatgggatagaattatttgaagatagtcagctaaccactcgctctaaagcaatagcatcaaaaaccaaagagattgaacaggtttaccgacaagactgtgaaactttcgggatggtggtgaaaatgctgattgaaaaagatccttcattagaaaagtctatacagtttgcattgaggcagaatntacatgaaataggtgagcggngtgttgaagaactcaagcatttcattgcagagtatgatacttccactcaagattttggagagcctttttagattttttctgcttcaggctaaaaaaaaaaaa

SEQ ID NO: 8875 - DNA, 585 bp, Homo sapiens
  unsure (18): n=A,T,C or G
  unsure (19): n=A,T,C or G
ccacactctacttctgcnnctgccacctatggggtcgaggcaggtgtggtgccttggctaagtccacagacttctgagaggcccacgctttcttcttctccagaaataaaccctgaaactcaagcagctttaatcagagggcaggattccacgatagcagcatcagaacagcaagtggcagcgagaattcttgattccaatgatcaggcaacagtaaaccctgtggaatttaatactgaggttgcaacaccaccattttcccttctggagacttctaatgaaacagatttcctgattggcattaatgaagagtcagtggaaggcacggcaatctatttaccaggacctgatcgctgcaaaatgaacccgtgccttaacggaggcacctgttatcctactgaaacttcctacgtatgcacctgtgtgccaggatacagcggagaccagtgtgaacttgattttgatgaatgtcactctaatccctgtcgtaatggagccacttgtgttgatggttttaacacattcaggtgcctctgccttccaagttatgttggtgcactttgtgagcaaggataccgagacatg

SEQ ID NO: 8876 - DNA, 241 bp, Homo sapiens
ctggcccgacctctggccccctcttccctggctgaatgtaaatatttaccagcatttagaaaaaaggagaaaaaagacagaactaaacccgtttaggaaaaagggaccgagggacagcagtggttaagtaatccactgaggacctgaaggggaaaatggacttacctttctcatatacttggcctggctagggcactgggtgccagacagccttctgaggggattttctttctaaatgagg

SEQ ID NO: 8877 - DNA, 579 bp, Homo sapiens
  unsure (18): n=A,T,C or G
  unsure (19): n=A,T,C or G
  unsure (168): n=A,T,C or G
  unsure (169): n=A,T,C or G
  unsure (179): n=A,T,C or G
  unsure (182): n=A,T,C or G
tgaacatgtagtcacagnntcaccaatcaaaaaggaagaaagtacaaaacattttccgaaaggcatgagaccaacaattcaagagtcagatactgagctcttattctctggactgggatcaggagaagaagttttacctactctaccaacagagtcagtgaattttanntgaagtggancanatcaataacacattatatccccacacttctcaagtggaaagtacctcaagtgacaaaattgaagactttaacagaatggaaaatgtggcaaaagaagttggaccactcgtatctcaaacagacatctttgaaggtagtgggtcagtaaccagcacaacattaatagaaattttaattgacactggagcagaaggacccacggtggcacctctccctttctccacggacatcggacatcctcaaaatcagactgtcaggtgggcagaagaaatccagactagtagaccacaaaccataactgaacaagactctaacaagaattcttcaacagcagaaattaacgaaacaacaacctcatctactgattttctggctagagcttatggttttgaaatgg

SEQ ID NO: 8878 - DNA, 264 bp, Homo sapiens
  unsure (17): n=A,T,C or G
  unsure (19): n=A,T,C or G
ggctgctctgggattcncntcagccaatcttcattgctcaagtgtctgaagcagccatggcagaagtacctgagctcgccagtgaaatgatggcttattacagtggcaatgaggatgacttgttctttgaagctgatggccctaaacagatgaagtgctccttccaggacctggacctctgccctctggatggcggcatccagctacgaatctccgaccaccactacagcaagggcttcaggcaggccgcgtcagttgttgtgg

SEQ ID NO: 8879 - DNA, 428 bp, Homo sapiens
  unsure (15): n=A,T,C or G
  unsure (16): n=A,T,C or G
  unsure (18): n=A,T,C or G
ctgagcatccagatnncnagtccctgacactgtttaaccacacagtgagagctgccaaatgagaccagcagaaaaactgtccagctagccccaggtaatccatacagtcgtgacagatagacagatgtgtagttttaggccattaggttttgggataattggttaagcaacaataaataaccaaaacaaaacttaaagttatgacagtccaaataaaatttcctgaaagtcgaaagataagaaaatattccagaactgaaaatttaaaaaacatttagaaataacgtgagatataagactcaagacaagaggtctaaaatccaattaacagacacttccaaatgaacaaataaaatggaaaagagaaagttaacaacaaaaatatgacaagattcaagactccaactttgaaagagcctatccatagg

SEQ ID NO: 8880 - DNA, 328 bp, Homo sapiens
  unsure (9): n=A,T,C or G
  unsure (16): n=A,T,C or G
  unsure (22): n=A,T,C or G
  unsure (39): n=A,T,C or G
  unsure (81): n=A,T,C or G
  unsure (88): n=A,T,C or G
  unsure (95): n=A,T,C or G
  unsure (194): n=A,T,C or G
  unsure (261): n=A,T,C or G
  unsure (321): n=A,T,C or G
agatttgantatttancctgcncaaaggccaatcttcanttatcaatgacaagaaaactctagggctgccaaaataacttnattttanaccccanagttagtgttaggctggtaatgtttctaatttgggaataatgagactagaaagctaggagggccccctccaaatttctcccttgtattaggctgaagtngaacataacgtggcttaaagcataaacttaaagcatatgctttgagttttaaaaatgttaacctgtnattaattattagagtattatccatagtctactatgatagtcagttaatattctctaaatnagattat

SEQ ID NO: 8881 - DNA, 579 bp, Homo sapiens
  unsure (47): n=A,T,C or G
  unsure (84): n=A,T,C or G
  unsure (112): n=A,T,C or G
  unsure (470): n=A,T,C or G
tagagataggaacggtgggtggtgggaccaacctactacctcagcangcctgtttgcagatgctaggtgttcaaggagcatgcnaagataatcctggggaaaatgcccggcngcttgcccgaattgtgtgtgggaccgtaatggctggggaattgtcacttatggcagcattggcagcaggacatcttgtcaaaagtcacatgattcacaacaggtcgaagatcaatttacaagacctccaaggagcttgcaccaagaagacagcctgaatagcccgacagttctgaactggaacatgggcattgggttctaaaggactaacataaaatctgtgaattaaaaaagctcaatgcattgtcttgtggaggatgaatagatgtgatcactgagacagccacttggtttttggctctttcagagaggtctcaggttctttccatgcagactcctcagatctgaacacagtttantgctttacatgctgtgctctttgaagagatttcaacaagaatattgtatgttaaagcatcagagatggtaatctacagctcacctctgaaggcaaatataagctgggaa

SEQ ID NO: 8882 - DNA, 324 bp, Homo sapiens
  unsure (14): n=A,T,C or G
ctgggatccgccgnccagcgggcggttcagggctcccggtactcctgcgtgttaatgagaacgttcattagcgctcttgacaggacggcgactgtgagacgcctggttacctattttagtaaatcgggaacactggatgcaaggcggttggttttcgtttttaagcaagcttaaatgttggttacgctacttttggggaaagggaaacgaaaggtgaatctcgagttctaagttgctttctaagaaacccccaggatttaagagcgaaaactctctgcgacaaaacactggatacgcgagtcttaaatacagctctccaaacag

SEQ ID NO: 8883 - DNA, 599 bp, Homo sapiens
ctgttgccaagacagagattgctttaagtggcaaatcacctttattagcagctacttttgcttactgggacaatattcttggtcctagagtaaggcacatttgggctccaaagacagaacaggtacttctcagtgatggagaaataacttttcttgccaaccacactctaaatggagaaatccttcgaaatgcagagagtggtgctatagatgtaaagttttttgtcttgtctgaaaagggagtgattattgtttcattaatctttgatggaaactggaatggggatcgcagcacatatggactatcaattatacttccacagacagaacttagtttctacctcccacttcatagagtgtgtgttgatagattaacacatataatccggaaaggaagaatatggatgcataaggaaagacaagaaaatgtccagaagattatcttagaaggcacagagagaatggaagatcagggtcagagtattattccaatgcttactggagaagtgattcctgtaatggaactgctttcatctatgaaatcacacagtgttcctgaagaaatagatatagctgatacagtactcaatgatgatgat

SEQ ID NO: 8884 - DNA, 608 bp, Homo sapiens
  unsure (579): n=A,T,C or G
ccttattttctgagccaaccgaggcaggagacactacaacacaaaaaaatgtgaaccacagagaccaccaagtacaaaaactgcaaactcataagcattaaaaaacattgggtggaactggttagagcacattagaataatttaccagaacttgtgcagagaaaagaatgaagactggtggggaataattgacaggttctgctcccccagcttaactatcattgtgaaggttaaaataaaagaagatatgaagctctagcataataaagaacacagcagaggctatatataaaaaagttaacataaaaatctgacaggtgaaggaatagaatatcctgggaaaagcaagaactacttactaaaacctttgtttttccacttggaatctgcatacttatattgaactaataaagtattgctatgaacaaactagtagaatgaattattttaacttctcaagaccctgatatagagctatccattttgcattctaaaccctctccaggctaattgacaaaggataataccagaaatagatcaggagttaaattatagttagaaaggggagagaagtaaggnaggacattaaaattttattctgaaattat

SEQ ID NO: 8885 - DNA, 314 bp, Homo sapiens
  unsure (14): n=A,T,C or G
  unsure (70): n=A,T,C or G
  unsure (71): n=A,T,C or G
gggaaccaaagctntcatggatgaggtggtgaaagccacttctaggggctgcatcaccatcataggtggnngagacactgccacttgctgtgccaaatggaacacggaggataaagtcagccatgtgagcactgggggtggtgccagtttggagctcctggaaggtaaagtccttcctggggtggatgctttcagcaatatttagtactttcctgccttttagttcctgtgcacagcccctaagtcaacttagcattttctgcatctccacttggcattagctaaaaccttccatgtcaagattcagctagtgg

SEQ ID NO: 8886 - DNA, 608 bp, Homo sapiens
gttggtaaagaatacaggagcagaaccgggcatggtggctcagcctgtaattccagcactttgggaggctgaagtgggcagatcacttgaggtcaggagattgagaccagcctggctaacatggtgaaaacctgtctctactaaaaatacaaaaattagctgggtgtggtggcatgcacctgtaatcccagctatttgggaggctgaggcaggagaattgctcaaaataaaaaaaaaaaaataaagaactaaaaagtgtggatactgttatgccacatgtgataataaaatattcaaggccacagatgcaagtcaccaacttacaaagagaatactgaaggtagggtacattaaaaaaatagagaaatgcaataaagaaaatgccacctctgcctaaatcaggaaagagtaaatgcataggcattaaaacagcagctctgcatactacactgcatttctctttgtcaaaaagaattcactgtgtatcattacaaaggtcagtgaataagacgaggcaataaacgtagcgccttggtattagggcaaatttagttttcttttcattttacacatgagggggaaaaaagaagtgtagaactaggaatgct

SEQ ID NO: 8887 - DNA, 592 bp, Homo sapiens
  unsure (515): n=A,T,C or G
actgccttgaagaaaaaggaccaatgttcgaactacttccaggtgaatccaacaagatcccccgtctgaggactgacctttttccaaagacgagaatccaggacttgaatcgtatcttcccactttctgaggactactctggatcaggcttcggctccggctccggctctggatcaggatctgggagtggcttcctaacggaaatggaacaggattaccaactagtagacgaaagtgatgctttccatgacaaccttaggtctcttgacaggaatctgccctcagacagccaggacttgggtcaacatggattagaagaggattttatgttataaaagaggattttcccaccttgacaccaggcaatgtagttagcatattttatgtaccatggttatatgattaatcttgggacaaagaattttatagaaatttttaaacatctgaaaaagaagcttaagttttatcatcctttttttctcatgaattcttaaaggattatgctttaatgctgntatctatcttattgttcttgaaaatacctgcattttttggtatcatgttcaaccaacatcattatgaaattaattag

SEQ ID NO: 8888 - DNA, 570 bp, Homo sapiens
accacatcatcctcacgtgttcggtactgagcagccactacccctgatgagaacagtatgaagaaagggggctgttggagtcccagaattgctgacagcagaggctttgctgctgtgaatcccacctgccaccagcctgcagcacaccccacagccaagtagaggcgaaagcagtggctcatcctacctgttaggagcaggtagggcttgtactcactttaatttgaatcttatcaacttactcataaagggacaggctagctagctgtgttagaagtagcaatgacaatgaccaaggactgctacacctctgattacaattctgatgtgaaaaagatggtgtttggctcttatagagcctgtgtgaaaggcccatggatcagctcttcctgtgtttgtaatttaatgctgctacaagatgtttctgtttcttagattctgaccatgactcataagcttcttgtcattcttcattgcttgtttgtggtcacagatgcacaacactcctccagtcttgtgggggcagcttttgggaagtctcagcagctcttctggctgtgttgtcagcac

SEQ ID NO: 8889 - DNA, 470 bp, Homo sapiens
  unsure (173): n=A,T,C or G
  unsure (182): n=A,T,C or G
  unsure (189): n=A,T,C or G
  unsure (203): n=A,T,C or G
  unsure (204): n=A,T,C or G
  unsure (236): n=A,T,C or G
  unsure (252): n=A,T,C or G
  unsure (260): n=A,T,C or G
  unsure (313): n=A,T,C or G
  unsure (404): n=A,T,C or G
  unsure (419): n=A,T,C or G
tatcttcccactttctgaggactactctggatcaggcttcggctccggctccggctctggatcaggatctgggagtggcttcctaacggaaatggaacaggattaccaactagtagacgaaagtgatgctttccatgacaaccttaggtctcttgacaggaatctgccctcanacagccagnacttggntcaacatggattannaagaggattttatgttataaaagaggattttnccaccttgacaccagncaatgtanttagcatattttatgtaccatggttatatgattaatcttgggacaaagaattntatagaaatttttaaacatctgaaaaagaagcttaagttttatcatcctttttttctcatgaattcttaaaggattatgctttaatgctgntatctatcttattgnttcttgaaaatacctgcattttttggtatcatgttcaaccaacatcattat

SEQ ID NO: 8890 - DNA, 295 bp, Homo sapiens
ttttaaatattttattttcctgttctttgtgaaaacatcaataaatatcgaaacctctctgctctaacacagagggaaacactgcataattaacattaaacaaggcagtatgccttacaagaaagacataaaatgtccaagggatatttagaacattttagttcttaaagcttcaacatgagaaatgttgaccacacactgtgaaatcatttcaataaataacaactgacattcatctttacagttacaaaatagacacacatacatttccctgccgtcacattgatcttactgg

SEQ ID NO: 8891 - DNA, 527 bp, Homo sapiens
ttaagaacatcactcttttaagagcctccaaaaatcaggagattcaggtaagtgtcctatcaagatttatcactgataagtctagatcatcatgaagtacattggaaaggcaacaggaagcaaagtaagcccgaagattctaagggaagcaactcctttctacataggcatttaaggcatttactgctagcaagctttccctaggaaactgaaaaagagatttaacgtccatcaaaagtaaaggaagaactttctcctggtgtggcagaagtatgtgtttttaattagtcattgattagaagtattggtatcaagatggaaatgatgatgattttcaatttcaaggaagagattatattcctcatatgtattctgccaacaggttttgttttttaaaatattttgaacagaaaatataattcataaacttaatcctctaaaaatcacaataggaagtcagctaaactaactctaatccaaccattctagtatatactatccaagggctgaagtgtcaggcaatgact

SEQ ID NO: 8892 - DNA, 604 bp, Homo sapiens
ccacgaagcaccgccaggacagttttcaaggaagagaaagtaaagggtctccaaagaagcggctggatgtccgtctgtcgagaacgtccagcgtggagcggggcaaggagagggaggaggcttggagctttgacggggcattggagaacaagcgaactgccgctaaggaatctgaggagaacaaggagaacctgatcataaattctgaactcaaagacgacttgcttttgtatcaggacgaggaggcgctgaacgactccattatttctggaacactgccacggaaatgcaagaaggagctcctggccgtgaagctaaggaaccggccaagcaaacaggaactagaagaccggaacattttccccagaaggactgatgaagaaagacaggagatccggcagcagatcgagatgaagctttccaaacggctgagccaaagacctgccgtggaagagctggagagaagaaatatcttgaaacaaaggaatgatcagacagagcaggaagaaagaagagaaatcaagcaaagattgacaagaaagcttaatcagagacccactgttgatgaattaagagacagaaaaattctgatacgattcagtga

SEQ ID NO: 8893 - DNA, 270 bp, Homo sapiens
  unsure (33): n=A,T,C or G
  unsure (37): n=A,T,C or G
  unsure (54): n=A,T,C or G
  unsure (84): n=A,T,C or G
  unsure (148): n=A,T,C or G
  unsure (159): n=A,T,C or G
  unsure (171): n=A,T,C or G
  unsure (183): n=A,T,C or G
  unsure (190): n=A,T,C or G
  unsure (233): n=A,T,C or G
  unsure (241): n=A,T,C or G
  unsure (243): n=A,T,C or G
  unsure (246): n=A,T,C or G
tcgacattctttttgttactgatacgtttaatngttntgtttgtaaggttccanaatatcttaaccatgtaagtaaacgcttanaggaagagggagacagagtaatcacttacttggaccacagcacacagtaagtaccgtttgctcnctgagcgttcntatcttcaccgnggctggaaggtnctcctgnctggttattgaaataaagggtgtctttgtcaattcattcagtnctaagagngnttntgcacctagcatattttactttgt

SEQ ID NO: 8894 - DNA, 597 bp, Homo sapiens
ccatccctggcactgagcccatgctgttcatctggacagagtggttcattggggaggctgcacgaggtcccatgggtgcttgtggcaactggacgttccccaaggacatggggttaaatgaattcatcccttgagaaacttgcatgcgattcactggcagggacaggggtccatttggaggtctcacaggttgtgcctgtggaatcacagggggctgagcccccggggctggtaaggctggctggttccccaagatgccttgtttatgtaaacgcgacctccgtttttcttctagttctttttgtatcttgtagattttctctgctaataagtgataatattcatccctgctgttggcagactcgtacatgtccccttccactttcttagcataggctaccaggttttccatgcggcgatcctttagagctgcgggatcaggtgttgggaagatggcttggacgagtttatgcactagatggctccgcaggtcctgagtgacatgttcgtgccagcctttccttacaccggtgctagaaggaggagctgctgttggtatagtgctgagggttccaatgttaccagagttggagccat

SEQ ID NO: 8895 - DNA, 435 bp, Homo sapiens
ccttcccactctttgtagtgccaggaaaatactgaatgtaagtgggtgcagctttgctcgctgtgaggagcagcagaatgcggcagcctctcctcccagaatctaggaatctgggaggcacaggacatccccaaaaggtcccaaacagttccagaccctatgtcttaccctccaccctaccagggaatgactatctacactaatgaagggctactgcccccatggctgaagccacagaatggtacaggagagaagactgtaatttgtgaccagaaacaggcaagctgtccctcccagccccaaagaatgggaacctgcccaccagtggcaccagggctgggggctaggagagatggcatccatcaaggagcccttaagaggctgcatctttaaggaccaggaaatgagtccatcagttaccaaggcttctcacag

SEQ ID NO: 8896 - DNA, 384 bp, Homo sapiens
  unsure (9): n=A,T,C or G
  unsure (71): n=A,T,C or G
  unsure (292): n=A,T,C or G
ctggtgcancttgcctcaatatcttatcactaagtgcattcctggacctgctttgagtcagtttacactanttatgcaattaagggtggaaggtaaagggggctgcacgtgaagaaactaaaatggagtctgtccggctctctctccgctaggagagagtcactcaggttaaaacaaggtagggtatcacaggaccatgtacaattcttcaaactccagcttcaactctctttcttattgctctcttaggacagtatatttagatcagagtaaatgaaagtaatgttattangagataagattaaaattgatcccatttgtaaaaagggaagtagattatttgtgaactgtaatactttttttactgaagaatcaccttaaaac

SEQ ID NO: 8897 - DNA, 593 bp, Homo sapiens
ctgactgactttgggcaaattccttcctctttccagatgccagtttctcaacaataaagtgagggagctttgctccgatttccctccttctcttactgcctaaacttgtcagatagaacttcaagtttgcttcaccttaggtcctgattgccaccacagtggggacagcagggacggtccccaagcctgaagcaagaagaggacagagaaggatgaactgcaggagactttgcctaagcagaaatccaaaccccatttttccctaaagatgaggcatcttacttcaaggacatttgtcaagttgttaaagttcccttgatggtctctcagaagccctggaacttctggaaatcacttgaactgtgataagaattctccttagagctgcctgagaatagcaggacacggcaggcgaggagggggagtcacctgctgccttaatcctctcagacagaaatgaaatttctcccaccgaagggtttccttgggcttcagggagctcacaaagctgcttgctagaaagaatatttagtccaagctgggaggagtggtgattttgataagaaaatcaagagccccattcacgttcccag

SEQ ID NO: 8898 - DNA, 600 bp, Homo sapiens
  unsure (572): n=A,T,C or G
ccatcttcccatctcccatgatgtatgctggaccaactgaggtccagtggcattgcagagcacggatggttgcaggagccaacttttacattgttggacgagaccctgctggcatgcctcatccagaaacagggaaggatctttatgagccaagtcatggtgccaaagtgctgacgatggcccctggtttaatcactttggaaatagttccctttcgagttgcagcttacaacaagaaaaagaagcgtatggactactatgactctgaacaccatgaagactttgaatttatttcaggaacacgaatgcgcaaacttgctcgagaaggccagaaaccacctgaaggtttcatggctcccaaggcttggaccgtgctgacagaatactacaaatccttggagaaagcttaggctgttaacccagtcactccacctttgacacattactagtaacaagaggggaccacatagtctctgttgacatttctttgtggtgtctgtctggacatgcttcctaaaaacagaccattttccttaacttgcatcagttttggtctgccttatgagttctgntttgaacaagtgtaacacactgatggtt

SEQ ID NO: 8899 - DNA, 595 bp, Homo sapiens
  unsure (8): n=A,T,C or G
cctcctcnaccaaggcagggaacttcaatctgtataagtatctgcagttgctggaataatttgaagaccccatggagctaaggagattaagtggaggattttcattgtttcagaggggcaaggggcaaatccattgctaattctttaatgatgaaaaatggtaagaagttgttaaactcctttggggattttaaaaagtgatacgtaaacagaagagagagagagagagagaaatcacagtagtgaggctaacaaaaataatgataaaaaggttagaagaacccaggatacttagtggatgcctagacaacataaaaatagatttatagaaggaagcaatggaatttgaatataaaagggtatcagaaagttaatgtgttgcatctgaaattcaaagtatttccttttggctacacaagaaagacttttaataaaaccctttgtatatatttctgaaaggtaaatattttatagggaaatggaggattggaagaaaatctgttccatcatgtctgggtattagaattttgcttaataacttgccaaaatattacgcttccaagggctatggcattatgtgtgtacccaattaaag

SEQ ID NO: 8900 - DNA, 606 bp, Homo sapiens
  unsure (517): n=A,T,C or G
ctgtcaccaggccagaaacaaaaagaagagcctaaggaagtgaagctcagtgttcccatgccctacacactcaaggtgcactacaagtacacggtagtcatgaagactcagcccgggctcccctacagccaggtccgggacatggtgtctaagaaactggagctccggctggaacacactaagctgagctatcggcctcgggacagcaatgagctggtgcccctttcagaagacagcatgaaggatgcctggggccaggtgaaaaactactgcctgactctgtggtgtgagaacacagtgggtgaccaaggctttccagatgaacccaaggaaagtgaaaaagctgatgctaataaccagacaacagaacctcagcttaagaaaggcagccaagtggaggcactcttcagttatgaggctacccaaccagaggacctggagtttcaggaaggggatataatcctggtgttatcaaaggtgaatgaagaatggctggaaggggagtgcaaagggaaangtgggcattttccccaaagtttttgttgaagactgcgcaactacagatttggaaagcactcggagagaagtctaggatgtttcacaaac

SEQ ID NO: 8901 - DNA, 95 bp, Homo sapiens
  unsure (8): n=A,T,C or G
  unsure (20): n=A,T,C or G
  unsure (88): n=A,T,C or G
ctggtttntaattctaatantataaaaattggaaatttgaaatagttctgtaaaagaaaaaaatgtaaaaatacatctgctttctctnatggttt

SEQ ID NO: 8902 - DNA, 448 bp, Homo sapiens
ctggagagtgtagatcccaaaattacccaaagaagaagatggaaaagcgatttgtcttcaacaagatagaaatcaataacaagctggaatttgagtctgcccagttccccaactggtacatcagcacctctcaagcagaaaacatgcccgtcttcctgggagggaccaaaggcggccaggatataactgacttcaccatgcaatttgtgtcttcctaaagagagctgtacccagagagtcctgtgctgaatgtggactcaatccctagggctggcagaaagggaacagaaaggtttttgagtacggctatagcctggactttcctgttgtctacaccaatgcccaactgcctgccttagggtagtgctaagaggatctcctgtccatcagccaggacagtcagctctctcctttcagggccaatccccagcccttttgttgagccagg

SEQ ID NO: 8903 - DNA, 603 bp, Homo sapiens
  unsure (477): n=A,T,C or G
cctttattgatttaattttcctttcaacttatcaatgctatcacaaattctaaggaaacaggacttgggcaaaattttttattatgaagatacagatctaagaacagaaggataattatgtgctagcttatatatagttccttgtaaaaataatgatacatgaaaaattagtagaaaatgaaaatctgcagttatctgatatctgaaaatgttaagcaatttcccctgcatcttagttctaatcacttttgcagaataatcaagcatatttgggtgaagagagtatttaatgattccatttttattaatagtgtagtgtgcccttcagagcttggcgtagtctttaagaatcatctgaagtttctggctcagcatgatgttccctctggccttcagcctgccactaaagaatgccttctgagggtcaagcttgcccaggaccacctccatgaaatcttcatctgaaagtatgattgntgtatcagcagcaccttttgcagggccttggtacacttttccagaaccacttttcaggtcaatagtccacttagccccaatatttccgcctttggttatatgccactcaaatacagcatttacacc

SEQ ID NO: 8904 - DNA, 324 bp, Homo sapiens
cctgtatagaacaacaatttgattctctcaatggaggagtatctgtgtcaaaaaatagtacttttgctgaggaatttgcacatagtattcggtcaatttttgcaaatgtagaagccaaacttggagaaccttctgaaattgaccagagagacaagtatgttggaatttgtggactctttgtattgcactttcagatttttcgaactattgataaaaagttttataagtctttattggacatttgtaagaaggtaccagccatcactctaactgctaatattatttggtttcctgataattttctgatccagaaaataccagcag

SEQ ID NO: 8905 - DNA, 200 bp, Homo sapiens
tgtgtctaggaaatagggcaggagtgggcgctgaggaggagtatgtcctcccagttaccttgagatctgccacagtgaggtttctatggcataccagagaatggaaagaagattaggttggcacttcctacttctgataccatcttcacggcttcattaggtgcccccaatttccacagaatctgaagttctgggcaagg

SEQ ID NO: 8906 - DNA, 564 bp, Homo sapiens
  unsure (191): n=A,T,C or G
ctgcttgcacaaatggatgttagtatgggaggaagagtggcagaggagcttatatttggaaccgaccatattacaacaggtgcttccagtgattttgataatgccactaaaatagcaaagcggatggttaccaaatttggaatgagtgaaaagcttggagttatgacctacagtgatacagggaaactaantccagaaacccaatctgccatcgaacaagaaataagaatccttctaagggactcatatgaacgagcaaaacatatcttgaaaactcatgcaaaggagcataagaatctcgcagaagctttactgacctatgagactttggatgccaaagagattcaaattgttcttgaggggaaaaagttggaagtgagatgataactctcttgatatggatgcttgctggttttattgcaagaatataagtagcattgcagtagtctacttttacaacgctttcccctcattcttgatgtggtgtaattgaagggtgtgaaatgctttgtcaatcatttgtcacatttatccagtttgggttattctcattatgacacctat

SEQ ID NO: 8907 - DNA, 593 bp, Homo sapiens
caggagggttgtctggagccaccaggttgcaatttgaggcagcagtagtgagggaaatggtatgagaagatttgtagatgttatgaggcagcatcttttgtgacatattttctcattttaggttttgaaaatagtgaagtactccctgaaaacacacaccaaataatgaactataaaaatacttggattatgaatatattttagtggcttctcttttctttttattataatgtatttttttctcatgcatactccatatcttgcttgtgttcaagcatactttaatttttaattcatcagttaagctgtctttgagttaccatgatattgggcatacctcattattttttacaccaaatgcattttaaaaaggaaaaaggacactgttttatcttctttcttgctgctttaatgaggatggagggataagttacaggctggcacattaaatgtactactatggaaggacctttttctttatcagtgtcccttccctacccttaaaatcactgatcagggtctagcagtatctgctcctcaaaacttgggaccaagtgatggtgttcccacttgcaatgtcctctcatagcact

SEQ ID NO: 8908 - DNA, 381 bp, Homo sapiens
ctcagtgttcatcagtgaagcgttctgggcacggccatgcccggctttcacatgttgtctgtgctgttctcactccagtgggagagcggagtagtcgccacagagagcacctggcccgcacagcctgttctgcattttacagaagtttcccaactcttgctttgttacatgcaaagtctagaaaggataaatgcaaaatattagcaggtgatgttgtgaagtttcctttttcttttcttttttttttttcctccttgatagagtgtcactctgtcacccaggctggagtgccgggcgtggtagttgacgcctgtaatcccagcagtttgggaggccgaggaggatggatcacctgaggtcagaagttcgaaaccagcctgg

SEQ ID NO: 8909 - DNA, 603 bp, Homo sapiens
ctggaggtgtaatagtgcgggtagtgggtttggagaagttccgaggcggcggtggcgccggtcaggacaaggatagcggaaccgggccctgggcttgtcgctcaccatgccgacagtagaggagctttaccgcaattatggcatcctggccgatgccacggagcaagtgggccagcataaagatgcctatcaagtgatattggatggtgtgaaaggtggtactaaggaaaagcgattagcagctcaatttattccgaaattctttaagcattttccagaattggctgattctgctatcaatgcacagttagacctctgtgaggatgaagatgtatctattcgacgtcaagcaattaaagaactgcctcaatttgccactggagaaaatcttcctcgagtggcagatatactaacgcaacttttgcagacagatgactctgcagaatttaacctagtgaacaatgccctattaagtatatttaaaatggatgcaaaagggactttaggtgggttgttcagccaaatacttcaaggagaggacattgttagagaacgagcaattaaattcctttctacaaaacttaagactttaccagatgaagt

SEQ ID NO: 8910 - DNA, 549 bp, Homo sapiens
cactaaagcatagtacgtggatgtcagtgagacagcatgagagccagcagtcatcaaagcgttccacgtttgaagttagcaactgcttaaagttatgccctattaaaattgctttctcaaaagtttgggttagtttcaaatgtgatattttggagggaaggtaaagtaggtatctttcaggtcgtgataatgagctcctatgaaaggatgcaatataatgacccgcttttctagaaagttcataatcagctctggaacaagcacacttgattcctcactgtgcttcagaatgagattaagatcagatgttggaacgtgctatgctgtagcgtgtctggaaacaaagtacacaaacctggctacggtgatgagttagcttctgcttactacctgtgacaacccaagtgggtgacactagtgaaccttctccagtctgcaggctggcatagaaggctcttagattatattgggcagcttgcaatctgccgaagcagtgacttgcatttccacacttggcttgagcactcaacccagaaggcgaagatagct

SEQ ID NO: 8911 - DNA, 437 bp, Homo sapiens
ccttaattttctgttcatggactgttaaaagtaaaaccaaactttcaaaagggataaacctaaatatttacttgttatcattagagagggaacatcaaatgctgggacatcattactaaccaatagcatcagacactggatttaatggataatcacaatggtcgtaatgtatacagacatatataccacgttctagtataaatttttcaaaaaatacaataataatataatttataaagaacactcttctatgaacaaccaccaccaccaaaaaagaaaaagccctcagaaaatttctcacaaataaggcaactaatgcctgatatctcaaaatcctttacaaaaggagatagttctagtcaaggagttttgggtatgttacttttttttcttctttttcttttcatctgcctccatcttaagtgcaatttcttcag

SEQ ID NO: 8912 - DNA, 595 bp, Homo sapiens
  unsure (84): n=A,T,C or G
  unsure (130): n=A,T,C or G
  unsure (139): n=A,T,C or G
  unsure (149): n=A,T,C or G
  unsure (155): n=A,T,C or G
  unsure (165): n=A,T,C or G
  unsure (170): n=A,T,C or G
  unsure (172): n=A,T,C or G
cctacttcacaaagcgccttcccccgtaaatgatatcatctcaacttagtattatacccacatccacccaagaacagggtttanaaaaaaaaaaaaaaaaaaaaaaaaaaagcttgtacaaaaaatgggngcgctgcantccagacagnaatttntgcaaactgncttgnanaaaaaggaccaatgttcgaactacttccaggtgaatccaacaagatcccccgtctgaggactgacctttttccaaagacgagaatccaggacttgaatcgtatcttcccactttctgaggactactctggatcaggcttcggctccggctccggctctggatcaggatctgggagtggcttcctaacggaaatggaacaggattaccaactagtagacgaaagtgatgctttccatgacaaccttaggtctcttgacaggaatctgccctcagacagccaggacttgggtcaacatggattagaagaggattttatgttataaaagaggattttcccaccttgacaccaggcaatgtagttagcatattttatgtaccatggttatatgattaatcttgggacaaagaattttatagaaattt

SEQ ID NO: 8913 - DNA, 597 bp, Homo sapiens
ccaaaagaagtaagacagcttgctgaagatttcctgaaagactatattcatataaacattggtgcacttgaactgagtgcaaaccacaacattcttcagattgtggatgtgtgtcatgacgtagaaaaggatgaaaaacttattcgtctaatggaagagatcatgagtgagaaggagaataaaaccattgtttttgtggaaaccaaaagaagatgtgatgagcttaccagaaaaatgaggagagatgggtggcctgccatgggtatccatggtgacaagagtcaacaagagcgtgactgggttctaaatgaattcaaacatggaaaagctcctattctgattgctacagatgtggcctccagagggctagatgtggaagatgtgaaatttgtcatcaattatgactaccctaactcctcagaggattatattcatcgaattggaagaactgctcgcagtaccaaaacaggcacagcatacactttctttacacctaataacataaagcaagtgagcgaccttatctctgtgcttcgtgaagctaatcaagcaattaatcccaagttgcttcagttggtcgaagacagaggtgcaggt

SEQ ID NO: 8914 - DNA, 576 bp, Homo sapiens; identical to SEQ ID NO: 8798

SEQ ID NO: 8915 - DNA, 435 bp, Homo sapiens
ctggagcccttccctgagaaactcttacaggccaggaagccagtacagatctttgagaggtctgtgtacagtgacaggctccactttgaggctctgatgaacattccagtgctggtgttggatgtcaatgatgatttttctgaggaagtaaccaaacaagaagacctcatgagagaggtaaacacctttgtaaagaatctgtaaccaataccatgaagttcaggctgtgatctgggctccctgactttctgaagctagaaaaatgttgtgtctcccaaccacctttccatccccagcccctctcatccctggagcactctgccgctcaagagctggtttgttaattattgttagactttgccattgttttcttttgtacctgaagcattttgaaaataaagtttacttaagttatgcttgtttttctaaaaaaaa

SEQ ID NO: 8916 - DNA, 450 bp, Homo sapiens
  unsure (438): n=A,T,C or G
gctgcctgtatctttcatttttaaaatagcacttgagttattttctgagtaatccaataaagaacttttgatgacagccagaatgtgttagaactctggctgaacatttcatctcctgtgagtcagaagggctttatttctccctttgatggggccccttcttctttctggtgctctggaagttgtttagaggaaagaattctaattttaattaattgcgcagtgagttaatctcactcgcttttctgcttccaggcatcttaggaaaaacaaatggttttagtagataagggatgcctactaatgcttttttaaaacaaacagggacatttttattatagatttgatttttttaatgaatgtttttaaaaatatataaataggacaccaaagcggcagggttttttttggggggagggggtttgttttccaactcangatggcacatta

SEQ ID NO: 8917 - DNA, 605 bp, Homo sapiens
  unsure (589): n=A,T,C or G
ccttggtcctagcacccactcgagaattggctcagcagatacagaaggtggtcatggcactaggagactacatgggcgcctcctgtcacgcctgtatcgggggcaccaacgtgcgtgctgaggtgcagaaactgcagatggaagctccccacatcatcgtgggtacccctggccgtgtgtttgatatgcttaaccggagatacctgtcccccaaatacatcaagatgtttgtactggatgaagctgacgaaatgttaagccgtggattcaaggaccagatctatgacatattccaaaagctcaacagcaacacccaggtagttttgctgtcagccacaatgccttctgatgtgcttgaggtgaccaagaagttcatgagggaccccattcggattcttgtcaagaaggaagagttgaccctggagggtatccgccagttctacatcaacgtggaacgagaggagtggaagctggacacactatgtgacttgtatgaaaccctgaccatcacccaggcagtcatcttcatcaacacccggaggaaggtggactggctcaccgagaagatgcatgctcgagatttcactgnatccgccatgcatgga

SEQ ID NO: 8918 - DNA, 597 bp, Homo sapiens
  unsure (372): n=A,T,C or G
  unsure (457): n=A,T,C or G
  unsure (521): n=A,T,C or G
ccaacattgcgaaaccctgtctctactaaaaaaaaaaaataaaaaatacaaaaattagctgggtatgatggcacatgcctctaatcccagctactgggaggctgaggcatgagaatcgcttaaacctgggaggcgggtttgcagtgagccaagatagcaccactgcactccagcctgggtaacagattgagactctgtcaaaaaaaaaaaaagatgttaaaggaaaaatctgaggcgcaattcatgaagtttagtgttccagtggcaaaatgtcacaggcaagtatttattgggaaaatgtggaagcaaaataaaggcaatcggttggttttcaattacataattgttttttgggggtaggtatcttcttanaaagtccctagtcacctaattatatgttagtaggctgcttgtgattggctggggttgtcttatttctaacataagcatttaccanaaatgatccaagttaagttttgcttatgcttgtatgtagtatgaccccgtgaagttttgcttgngtttgtagtttaagcaaagttaaagctatttctaagggccaggtggttttgtttgctcaggatttttccagtctcc

SEQ ID NO: 8919 - DNA, 570 bp, Homo sapiens
  unsure (26): n=A,T,C or G
  unsure (93): n=A,T,C or G
  unsure (98): n=A,T,C or G
  unsure (144): n=A,T,C or G
  unsure (383): n=A,T,C or G
  unsure (384): n=A,T,C or G
  unsure (387): n=A,T,C or G
  unsure (530): n=A,T,C or G
gctagactaagttggtcatgatgcanaagctactcaaatgcagtcggcttgtcctggctcttgccctcatcctggttctggaatcctcagttnaaggntatcctacgcagagagccaggtaccaatgggtgcgctgcaatccanacagtaattctgcaaactgccttgaagaaaaaggaccaatgttcgaactacttccaggtgaatccaacaagatcccccgtctgaggactgacctttttccaaagacgagaatccaggacttgaatcgtatcttcccactttctgaggactactctggatcaggcttcggctccggctccggctctggatcaggatctgggagtggcttcctaacggaaatggaacaggattaccaactnntanacgaaagtgatgctttccatgacaaccttaggtctcttgacaggaatctgccctcagacagccaggacttgggtcaacatggattagaagaggattttatgttataaaagaggattttcccaccttgacaccaggcaatgtanttagcatattttatgtaccatgggtatatgattaatcttg

SEQ ID NO: 8920 - DNA, 225 bp, Homo sapiens
cctttcctctgcaggttggagaacacagcgcgcgaccatgaacgcttccttttgtacgtctgcggcatggtgtccttcgtgagcacagcatagggacctggaaacgtgtcttggaactgatgctgaactgaatttcttgggttcgagtttaagggactctggattgcagaagcctcgttaatgggatctagagatgcgaagaactggccggccgagggctgcagg

SEQ ID NO: 8921 - DNA, 600 bp, Homo sapiens
  unsure (3): n=A,T,C or G
  unsure (43): n=A,T,C or G
  unsure (77): n=A,T,C or G
  unsure (102): n=A,T,C or G
  unsure (221): n=A,T,C or G
  unsure (316): n=A,T,C or G
  unsure (419): n=A,T,C or G
  unsure (570): n=A,T,C or G
canagagccaggtaccaatgggtgcgctgcaatccagacagtnattctgcaaactgccttgaagaaaaaggaccaantgttcgaactacttccaggtgaatncaacaagatcccccgtctgaggactgacctttttccaaagacgagaatccaggacttgaatcgtatcttcccactttctgaggactactctggatcaggcttcggctccggctccggcntctggatcaggatctgggagtggcttcctaacggaaatggaacaggattaccaactagtagacgaaagtgatgctttccatgacaaccttaggtntcttgacaggaatctgccctcagacagccaggacttgggtcaacatggattagaagaggattttatgttataaaagaggattttcccaccttgacaccaggcnatgtagttagcatattttatgtaccatggttatatgattaatcttgggacaaagaattttatagaaatttttaaacatctgaaaaagaagcttaagttttatcatccttttttttctcatgaattcttaaaggattatgctttaatgctgntatctatcttattggtcttgaaaatacctg

SEQ ID NO: 8922 - DNA, 501 bp, Homo sapiens
ccattgctagttggacgtcggaaggaaaaaaatgttcaaggtataattgaaatcctcaaaggaatgcaagaattgggagtacatcctgatcaggaaacatatacagattatgtgattccatgctttgatagtgtaaactcagcacgagccattttgcaggaaaatggatgtctgtctgatagtgatatgttttctcaagctggattgagaagtgaagcagcaaatgggaacttagactttgtattatcatttttgaaatcaaatacattgcccatctcgctgcagtctataagaagtagcctactgctaggcttcaggaggtctatgaatataaatctttggagcgagataacagaattgttgtacaaggatggacgttattgccaggagcctcgaggaccgacggaagctgttggctattttctttataacttgattgacagcatgagtgactcagaggtacaggccaaggaggagcatttgagacaatacttccatcag

SEQ ID NO: 8923 - DNA, 604 bp, Homo sapiens
  unsure (565): n=A,T,C or G
ctggcaatgacaagactgggagtatcaaactaggattgttagttcaattaaaatttcagataaacaataatgtacttatactaaaaaattatttgttgtttatctgaaatgaaaatttaactgggtacccaattgtttgtttgtttaatctaaaaaccctgattgaaatttatctaataaaacatcatttaatatctaaaataaaataaatttactataacatctttataactattcaatcaatgattcatcttctatttttccaaattcttgcacaaatatttgatgcttaaataaatacataaataataaataggttaataagttacacttgaaaataatttatgttatgatgaaaaaacttaaagtgcttccacatgtcctcacaacatcactgtgaggtaagatggtggctaatactttttccacttagaaataaaggagaaaccaaggcacagtggaacaaggacttgtggatcctggctagcagactagggttgccagatttaacagaaaaaaatccaggatttccagctaaatttgactttatggcaaaatttattgncccatcatttttatgtgatgcttcaaatatcacattcta

SEQ ID NO: 8924 - DNA, 577 bp, Homo sapiens
ccaagggcagtttgctggatttcctgaagagcaatgaaggtggcaaagtgctgcttccaaagctcattgacttttctgctcagattgcagagggaatggcatacatcgagcggaagaactacattcaccgggacctgcgagcagctaatgttctggtctccgagtcactcatgtgcaaaattgcagattttggccttgctagagtaattgaagataatgagtacacagcaagggaaggtgctaagttccctattaagtggacggctccagaagcaatcaactttggatgtttcactattaagtctgatgtgtggtcctttggaatcctcctatacgaaattgtcacctatgggaaaattccctacccagggagaactaatgccgacgtgatgaccgccctgtcccagggctacaggatgccccgtgtggagaactgcccagatgagctctatgacattatgaaaatgtgctggaaagaaaaggcagaagagagaccaacgtttgactacttacagagcgtcctggatgatttctacacagccacggaagggcaataccagcagcagccttagagcac

SEQ ID NO: 8925 - DNA, 467 bp, Homo sapiens
  unsure (55): n=A,T,C or G
  unsure (75): n=A,T,C or G
  unsure (102): n=A,T,C or G
  unsure (124): n=A,T,C or G
ccactagctgaatcttgacatggaaggttttagctaatgccaagtggagatgcanaaaatgctaagttgacttangggctgtgcacaggaactaaaaggcangaaagtactaaatattgctganagcatccaccccaggaaggactttaccttccaggagctccaaactggcaccacccccagtgctcacatggctgactttatcctccgtgttccatttggcacagcaagtggcagtgtctccaccacctatgatggtgatgcagcccctagaagtggctttcaccacctcatccatgagagctttggttccccgggcaaaagcttcccattcaaatacccccacaggaccattccacacaatctgcttagcccgagtgacagcctcagcatacttcttgctgctttcaggaccacagtccaagcccatccagccagcaggtatgccagaagccacagtggcttgg

SEQ ID NO: 8926 - DNA, 478 bp, Homo sapiens
ctgaaccctcgtggagccattcatacaggtccctaattaaggaacaagtgattatgctacctttgcacggttagggtaccgcggccgttaaacatgtgtcactgggcaggcggtgcctctaatactggtgatgctagaggtgatgtttttggtaaacaggcggggtaagatttgccgagttccttttactttttttaacctttccttatgagcatgcctgtgttgggttgacagtgagggtaataatgacttgttggttgattgtagatattgggctgttaattgtcagttcagtgttttaatctgacgcaggcttatgcggaggagaatgttttcatgttacttatactaacattagttcttctatagggtgatagattggtccaattgggtgtgaggagttcagttatatgtttgggattttttaggtagtgggtgttgagcttgaacgctttcttaattggtggctgcttttagg

SEQ ID NO: 8927 - DNA, 605 bp, Homo sapiens
ctgggaagccacgagaatattgtgaacctgctgggggcgtgcacactgtcaggaccaatttacttgatttttgaatactgttgctatggtgatcttctcaactatctaagaagtaaaagagaaaaatttcacaggacttggacagagattttcaaggaacacaatttcagtttttaccccactttccaatcacatccaaattccagcatgcctggttcaagagaagttcagatacacccggactcggatcaaatctcagggcttcatgggaattcatttcactctgaagatgaaattgaatatgaaaaccaaaaaaggctggaagaagaggaggacttgaatgtgcttacatttgaagatcttctttgctttgcatatcaagttgccaaaggaatggaatttctggaatttaagtcgtgtgttcacagagacctggccgccaggaacgtgcttgtcacccacgggaaagtggtgaagatatgtgactttggattggctcgagatatcatgagtgattccaactatgttgtcaggggcaatgcccgtctgcctgtaaaatggatggcccccgaaagcctgtttgaaggcatctacaccattaagag

SEQ ID NO: 8928 - DNA, 605 bp, Homo sapiens
ctggtggaagctctctgaagaactgagacaggaggtggcactgctctgacaccatcctttgaaggtgacagagcatctcagggcttgggggacgccagccggactttgagaggagacagaagaggtgcttgcagaggtatttcacaaagatcagggtctcggcccaaaagttgacttctgctttttcaaacaggtagtcttcttccacctgatgcatgctctccacacaggccacgaggtcatcactctctcccaacagccatcccagcaggatgggcagtccaggggccaactggtcccactgctggagcagatcacacaggacggccagggccagggccagagcgatggaggcatccacctggcagaaggcaaactctgttgactggcaggtattttcttgtgacatggcagttgtcacggtttccgtggctgcatctctaacagcttgctcctcactctgcagaagggtaaggacacacttccagagagcaagtgtatcctgcaactcaagaataggatgggggttggtgaggaaaagtggtgtagtactggtgaggacttcaacgacggccagcctagactctgtaggaagatggtcttca

SEQ ID NO: 8929 - DNA, 598 bp, Homo sapiens
ctgctgaaccctttagggcatttcctctgtaatgtggcgctttcaactgtactgctgcagctttaagtaccttaaagcttctcctgtgaacttcttagggaaatgttaggttcagaactaaagtgttttgggtgggttttgttgcgggggggagggtaacaatgggtggtcttctgatttttatttttgaggttttgtcaactggagtacgtagaggaactttatttacagtactttgatttggcaggttttcttctacttgtgctctgcctggagctgtttccatatgatataaaaagcaagtgtagtattccattactatgtggcttagggatttatttgttttttaaaatcaaccatgttagctgggattagactccctacagtccttcaatggaaaagtaacatttaaaaatcctttgggtaattcaaattacagatttaaaagagcttaagatctggtgttttgttaatgcttctgtttattccagaagcattaaggtaacccattgccaagtatcattcttgcaaattattcttttatataactgaccagtgcttaataaaacaagcaggtacttacaaataattactggca

SEQ ID NO: 8930 - DNA, 597 bp, Homo sapiens
ctgaatttcacttttctttaaaaatttaatattaaaatgttttcatctcttaattgttggcttgcttgcatggatcattcattaaataattttttatttgctagatacccataatatctgccgaacatctgactagccacaagtatgttacccagatgtagaattttcatcactaaacagtaagttcattatgtaatatatagttgcatatttgtggtggttttttttaagatagcaattgtatagtgcacttaaaattttgcgaaatctctgagaaaatatatacagatcacatttttatcttaaatgggtgtgaggaattttatcagacatctttataacaaatatgttaatatcacttaaatatacaaagtactaagagaaaataaattttttaaatttctgattagagataaacacagcataaagaaaatgtatgaccaaaaagtaattagaaggtatagatcaagggttggcaaactttcttatagggtcagacagtaagtatttttgctgtgtgggccgtatcgtttctgttgcagctactctcctctgccattgtatcatgaaagcagccagagaccacatgtaaacaaa

SEQ ID NO: 8931 - DNA, 576 bp, Homo sapiens; identical to SEQ ID NO: 8798

SEQ ID NO: 8932 - DNA, 305 bp, Homo sapiens
ccttgctcggagtcccaggagatccacaggtccggcatgaacagtgagaggtcagaggtggaaggctcagcaggagaggagaggaggatcagcagaggtcatgagaaggccagaatccagggtcaggctgtcctggtcgaagttgagtttcttagctggaggagtttctcctagcccttcaatatccaccacgtcactgttggcatcggagtcgttcagagcactgagtgtcacatcagccttctgtttctttatggggggacccccggcctcagggacactggagctgctgggaggaggggcag

SEQ ID NO: 8933 - DNA, 401 bp, Homo sapiens
ccgcgccggtgagtagcactctctgagagctccaatttcatccgtctgccatcggcgccatcctgcaatctaagccacaatggtgcgcatgaatgtcctggcagatgctctcaagagtatcaacaatgccgaaaagagaggcaaacgccaggtgcttattaggccgtgctccaaagtcatcgtccggtttctcactgtgatgatgaagcatggttacattggcgaatttgaaatcattgatgaccacagagctgggaaaattgttgtgaacctcacaggcaggctaaacaagtgtggggtgatcagccccagatttgacgtgcaactcaaagacctggaaaaatggcagaataatctgcttccatcccgccagtttggtttcattgtactgacaacctcag

SEQ ID NO: 8934 - DNA, 593 bp, Homo sapiens
aaggctaccatgccggatctgtaaatgaacctgttaaatgctgtatttgctccaacggcttactatagaatgttacttaatacaatatcatacttattacaatttttactataggagtgtaataggtaaaattaatctctattttagtgggcccatgtttagtctttcaccatcctttaaactgctgtgaatttttttgtcatgacttgaaagcaaggatagagaaacactttagagatatgtggggtttttttaccattccagagcttgtgagcataatcatatttgctttatatttatagtcatgaactcctaagttggcagctacaaccaagaaccaaaaaatggtgcgttctgcttcttgtaattcatctctgctaataaattataagaagcaaggaaaattagggaaaatattttatttggatggtttctataaacaagggactataattcttgtacattatttttcatctttgctgtttctttgagcagtctaatgtgccacacaattatctaaggtatttgttttctataagaattgttttaaaagtattcttgttaccagagtagttgtattatatttcaaaacg

SEQ ID NO: 8935 - DNA, 579 bp, Homo sapiens
  unsure (465): n=A,T,C or G
  unsure (549): n=A,T,C or G
ccaacatggtgaaaccccatgtttactaaaaatacaaaaattagccaggcatggtggtgcatgcctgtaatcccagctactggggatctgaggcaggaggatcgcttgaacccaggaggcagaggttgcagtgagctgagatcatgccactgaactccagcctgggcaacagagagactccgtctcaaaaaaaaaaaaaaaaaattcatcaaggtatatacatatacattcagattagtgtacatgtaaaatatgatatacaacagagcctttcatgaataggataatttgcatattcatatggaaaacatatgcagtatcttaagccatagttttccaaaatttcaaattaaatacttatagctttgacatattcctgttacttcaactttccagggatgctctagaagaaacgggagacatgttgtaagactttaatgacattccacaaactaaatttattgngggaattaacatcagaaattaagggaaaaaatactctaatttgatcactagctgctacatggtccactttctagggagtcttgnatatttttttcacaattctgtttgctaagt

SEQ ID NO: 8936 - DNA, 487 bp, Homo sapiens
ccacaggtcctgcctagacacacatcaatatgaaacaaaaaaaatttatataaataagtcaattaaacttcacaaaaactaaagaaacacaagacaaaaatccaacaagcaataaaaactgtacaatattggtcagtcttttatatctgaaaaatgtgtaacttaaaaaaaagttatttatcgtataaaaaaaagtcttttacatctgtgttagctggagtgaaaacttgaagactcagactcagtggaaacagatgaatgtccacctcgctttcctttggagaggatcttgaggctggaccctctgctcacagaggtgagtgcgtgctgggcagaggttttaaatttggctccaaggaaagcatagaggatggggttcagacaacagtggaagaaagctagggcctcggtgatggaaatccacttgtgcacagtgttctcaaactcacacccttgcttgatgatttccaggaggatgaaggagtcg

SEQ ID NO: 8937 - DNA, 608 bp, Homo sapiens
ccacgaagcaccgccaggacagttttcaaggaagagaaagtaaagggtctccaaagaagcggctggatgtccgtctgtcgagaacgtccagcgtggagcggggcaaggagagggaggaggcttggagctttgacggggcattggagaacaagcgaactgccgctaaggaatctgaggagaacaaggagaacctgatcataaattctgaactcaaagacgacttgcttttgtatcaggacgaggaggcgctgaacgactccattatttctggaacactgccacggaaatgcaagaaggagctcctggccgtgaagctaaggaaccggccaagcaaacaggaactagaagaccggaacattttccccagaaggactgatgaagaaagacaggagatccggcagcagatcgagatgaagctttccaaacggctgagccaaagacctgccgtggaagagctggagagaagaaatatcttgaaacaaaggaatgatcagacagagcaggaagaaagaagagaaatcaagcaaagattgacaagaaagcttaatcagagacccactgttgatgaattaagagacagaaaaattctgatacgattcagtgattac

SEQ ID NO: 8938 - DNA, 383 bp, Homo sapiens
ccaggcattaaacttagtaacattaagtacactttagtactacagcagtcaaagagatctccactagagatcagaaagaagcaccactattttcttctatgacgtgtatgtgttggtcatgagcatgctagtatgaataaggcaatgtgttaagcactggcatacaaatgcagctaaaggtgctgaaggaaggcagtggggtggtgcaggcacacagcagggagctcttccccgtgacacgttagtcatcttctccacagagcaacagaagagctttcttatagtccccagatgtatctcccttaatcatggaataaagagaggtggcaaaattcttcctaaactccttcctgatgttaaacagatcaatctcactcctggaa

SEQ ID NO: 8939 - DNA, 604 bp, Homo sapiens
  unsure (499): n=A,T,C or G
ccacagaacagtccctttttgagtaaagcagcaaggttgcttaatgacatgctatgtggttaacaagattcaactgccacatcaaggactttaaataatttcaagattttaaatgtatttatgaaatgaactcattacagcagctaatcaatgcaaactttgtcctttttctttgtctttctaagagaaactgaatttaatttaaatttaaattacagtgtctaaaacttggtaaaatattttaaatttgaataagaggaaaaaaaaaacatgaatttatttatgatggagcttcatacccaggacagtagcttcttaaatgttagtaaaataattatgttaagcattaaaacaattttgaatatgtaattaagcatttatgttaaaaaacatgtttcttacgtgtgtgtgtatatatttataactgacacatgtgattctttgtacagtatttagaatccttcccttcagatagcagtcctcttgtattcagtcttgnggctaaaatagatcaaaaacatattttaaaactgttaaagtaactgtatgactcatgcttgaagttctgaaatttgggagcgttatgaggtttccatgccattaa

SEQ ID NO: 8940 - DNA, 279 bp, Homo sapiens
ccaccaccacgtcgatgcggtccactgagaaggggttgaactgcttgtccggccggcgcatgaactcatgcttgaggaggtagccgctctgcccgttgaactcaaatactgccatgttctgctgcatgggcaagtccatcgtctggaagttgagggcaaccatctggcatccagcattccagaacatctggggcatgtagttggaggagtccatgcgggttcccttggggtaaatgcggctcatctggcgcttgttgtagtccacaaactgcaccgagg

SEQ ID NO: 8941 - DNA, 234 bp, Homo sapiens
ccatttaagtttagtagtaaaagactggttaatgataacaatgcatcgtaaaaccttcagaaggaaaggagaatgttttgtggaccactttggttttcttttttgcgtgtggcagttttaagttattagtttttaaaatcagtactttttaatggaaacaacttgaccaaaaatttgtcacagaattttgagacccattaaaaaagttaaatgagaaaaaaaaaaaaaaaaaaa

SEQ ID NO: 8942 - DNA, 438 bp, Homo sapiens
ctgggaaaatgaagggaatcatggtcaaatccttggagggacagaaggaaggcaatgggagaaaccagccagcctgggttttcaataccaactcacatgcaaggtaacccaagcctcatcctctgatctgtaaattggggcaaatgtgaattatttcccttgttgaaaaatatttaaaagatgagggtaggtggaacgtgaacatatgtgtgttttaaacttactgtagcttattgataggaattacagttctggcaaatttcccaaaacctgtagtaataccgtaaacaactaggataaaaagagacattatgcaattaaatgcagggatttttgtttgtttataaaaatatttataacataaagataaaaagatacctgttttctcttttatgatgctatctatgacctccctggatttctgcaccctcttctcag

SEQ ID NO: 8943 - DNA, 573 bp, Homo sapiens
  unsure (519): n=A,T,C or G
  unsure (520): n=A,T,C or G
  unsure (522): n=A,T,C or G
ccaggctggtcttgaactcctgaccccaggtgatccactcgcctcggcctcccaagtgctgggattacagacgtgagccaccacgcctggctcactttattttattgatgaagagccccaaacactgggtgggaaggggacttaaggccactcagctcatcggtgggagagacgggacaccttttccatcccacgatgcctcatagaaccgggagagagtggaggacgctaagtgtagaaaactctgttaaggagcttggtgctcgggtgagaatggaggcagcagagcactttgggaaggggcaagagaaagaggacagttctagaaagacagttctttcaagatagcccgttggagatgcctggcaggaaatgggcactcaaggctggagatgcatctttagatgtggagtcttaggattaggtggaagcagaagacctgagcatgtctgggctttcacacgaaggatgagaagagacgaggatggaattccagggcacaccaaccatgaatgggcnngncaaaggaaaaaccgccagcaaaggagaccaagaaggtgataaaacagactt

SEQ ID NO: 8944 - DNA, 591 bp, Homo sapiens
  unsure (584): n=A,T,C or G
ccaaagaccaaattccttggcatgccttccagcaccctgcaaaatgagaccctcgtggccttccccagcctcttctagagccgtgatgcctccctgttgaagctctggtgacaccagcctttctcccaggccaggctccttcctgtcttcctgcattcacccagacagctccctctgcctgaaccttccatctcgccacccctccttccttgaccagcagatcccagctcacgtcacacttggttgggtcctcacatctttcacacttccaccagcctgcactactccctcaaagcacacgtcatgtttcttcatccggcagcctggatgttttttccctgtttaatgattgacgtacttagcagctatctctcagtgaactgtgagggtaaaggctatacttgtcttgttcaccttgggatgatgcctcatgatatgtcagggcgtgggacatctagtaggtgcttgacataatttcactgaattaatgacagagccagtgggaagatacagaaaaagaggggctgggctgggcgcggtggttcacgcctgtaatcccagcactttgggaggccaaggagggnggatcac

SEQ ID NO: 8945 - DNA, 266 bp, Homo sapiens
  unsure (31): n=A,T,C or G
  unsure (138): n=A,T,C or G
  unsure (220): n=A,T,C or G
  unsure (221): n=A,T,C or G
  unsure (244): n=A,T,C or G
  unsure (256): n=A,T,C or G
tgattgtagctatgttggtgtatctcgtgtncaagatggaaaagtgcttttgttgttctacctgatccagttgggggagcaggaatagggggtgcctgcctaacggcctctagcccatgtgcttatactgggatctgncccgagggatctgcacctggttggcagtcattttgtggtggacgtggtaaatcgcgagtgttaccatgatgacgaggcccannatgagccccaaaatcaggggcanggtttcttccanttgctcccgc

SEQ ID NO: 8946 - DNA, 460 bp, Homo sapiens
  unsure (125): n=A,T,C or G
agaaaggaataagctattaatacatgccacaacctagatgaatctcaaaataattatgctgaatgaaaaaagcagaagaaatatttgaagtaataatgactcagagtttcccccaaatgaacgtnagataacaaaccacagatccaggagaacactaacaggaaaaatatcccccaaaatatatcaaggcatatcatatttaaattgcagaaaatcaaagataaatacaactctgaaagtagccagaggaaaaaactttacccacacaggggctaagataataattatgtctgactacgcctcaggagccatgaaagcaagaaaagagtccggagaaatatttaaagcattgacagaaaaaaaaataccaccaacctagaattctggtaccctgggaattgcctcaaaagtaaagaataaatactttctcagacaaacaaaaattgagagaatttgtcag

SEQ ID NO: 8947 - DNA, 572 bp, Homo sapiens
  unsure (72): n=A,T,C or G
  unsure (254): n=A,T,C or G
  unsure (295): n=A,T,C or G
ctggtcaagaggctcacatctgcagaggtgccaatggccacagacaggctgctctctgagggttctgttggnggagaatctgaaggctgcagatcctttctagatggaagcttagaggatgcttttaatgggcttttacttgcattagaaccacataaagagcagtataaagagtttcaggatctgaaccaagaagtcatgaatttggatgatattctaaaagatgctaaacaccttgacgatcagaaactaantggtgctgcctcttggacggagatcactgagggtgaatganacaactgtgatttaaaagaccgaaagacgttttcccatgtgcttttgtgccatcttgagtgtcagagacagatccctgcaaggcccttcctaccttgcgctaagaaatcagcaaggagtgtcacctaactggatggaggacatttagtgcttctaacttgcagaatttgtcccattcgacccaccccagcatcctcttgaatatttggaaatacttctctccaactctgtgcccatagcaactggcattgttttgcttgtaatgtttctgcatgtgg

SEQ ID NO: 8948 - DNA, 381 bp, Homo sapiens
  unsure (9): n=A,T,C or G
  unsure (18): n=A,T,C or G
  unsure (112): n=A,T,C or G
  unsure (142): n=A,T,C or G
  unsure (242): n=A,T,C or G
  unsure (272): n=A,T,C or G
  unsure (315): n=A,T,C or G
  unsure (366): n=A,T,C or G
ctggatctncaatgcagncgattgttcctccaaaggccaagtaccatgctcattgagggtaggttttgtagctccttctgacactttacatgaagtgccttgtcagcacatntgtagccttgaccacagcttaaatgtttgnatactcctttttattagggcagcttcattttgtttacacactgttttcatttctccagggaacaatttcaaaatgatcttccagatgctatataactaanaacttttaaactactgacctcaaaggtcancctgtttactggcatctgactgtgtagaacaggaagtttgtgntgcatcttgtgttcttaatgaaatccgacaacagaggactgaacgcattantctcagaacaggagg

SEQ ID NO: 8949 - DNA, 564 bp, Homo sapiens
cctctcagaaaactgagcatactagcaagacagctcttcttgaaaaaaaaaatatgtatacacaaatatatacgtatatctatatatacgtatgtatatacacacatgtatattcttccttgattgtgtagctgtccaaaataataacatatatagagggagctgtattcctttatacaaatctgatggctcctgcagcactttttccttctgaaaatatttacattttgctaacctagtttgttactttaaaaatcagttttgatgaaaggagggaaaagcagatggacttgaaaaagatccaagctcctattagaaaaggtatgaaaatctttatagtaaaattttttataaactaaagttgtaccttttaatatgtagtaaactctcatttatttggggttcgctcttggatctcatccatccattgtgttctctttaatgctgcctgccttttgaggcattcactgccctagacaatgccaccagagatagtgggggaaatgccagatgaaaccaactcttgctctcactagttgtcagcttctctggataagtgaccac

SEQ ID NO: 8950 - DNA, 608 bp, Homo sapiens
  unsure (34): n=A,T,C or G
  unsure (36): n=A,T,C or G
  unsure (43): n=A,T,C or G
ccaaacatacattaagtttaatttcaatgacagntncaatttncaatttacttttagatggttagttaactcttttcctactaaatgaaaatattcaatatgccacatatgaaaaaaataaaattctcccacccacaaaaaatcctccaggggcacaaaaaaaatcatttgttccctcatttttaaatatttctgcatgatgagacaatataaaggcacaatataggttaaaataaatcactctgtggtttctcaaaaaaagtgaaaacagatccaccatatgatccagcaatcccacttctgggaatacatccaaaagaaaggaaataagtaccttgaagagatatctgtactcccctgtttattgcagcactattcacaatagccaagatatggaagcaataatatttcttcttgaggaataaaatttttaaatgtggtatttatatacaatggaatattattcagccatgaaaaagaataaaactctatcatttgcagcaacatggatggaactggaggatattatgttaagcaaaataagccaggcacagaaagacaaatatcacatatcctctgtcatatgtgggagctaaaaaagttgatct

SEQ ID NO: 8951 - DNA, 479 bp, Homo sapiens
ctgggaacatttcccagtgcaactcacatttttcactgctctgtgcctgtctgtataagctcaatgagtattgatttaggggctttggagaactttgaatgctaccccccaagtaaccattattggcaacctggtacctctacttttagccatttctccttctctataaacagtgcagaagtaacccacttggtaacaggcatccttgccaagcctccaccactaggtcagtgtaagaattaaagaaagaggaaagaaacacgaaaagtggcttgatggttaagacaggtttattttagagaaaacacacctgagaggggctgctggctgaattaggttagagtcttttctacagactaagagtgtttaaggatttagggtgggagagtttcttagaggcttggactgcttctgtgtttttttgttgtgcttatatgggagggagagtggtgtgtttgcttttatacatttttctgcag

SEQ ID NO: 8952 - DNA, 608 bp, Homo sapiens
ctgtggctgtctgtcagagaagcacatttttctgcagataattagaatggcttcccccatctctcacggactgtcccaagtctagaaaagaattgagttcctcttctattagtcaaataaaagggaagagaatgtttgtcttcctttcctttctgtagtgttaagaaaataaacgaacttaatgattctaaattatcagtgagcttaacactgtactatagaccaaagattaccttttcaaaaagtcctttgaggtgaaatattttgtatacgtaatacatagatgcacatataaacacacacatatagaatctcaatattttaacacttctttgggtagttgtactaactcactaaccctgaggaaaaagttaagaaattgaaagtgttttcttcaaaagttgagatttaacaataaaaggtgttactttgataactaaaaggaactttattatcctcttcctaaaataaaccaatgcctattctgaaaatggcacttgcaattacaatttgccattatcaaagctaccactgaggtagaggcattatctaaaacaaataccacttatcatttattggcagttacctcgagagagacccatacacca

SEQ ID NO: 8953 - DNA, 68 bp, Homo sapiens
  unsure (28): n=A,T,C or G
  unsure (33): n=A,T,C or G
  unsure (47): n=A,T,C or G
  unsure (50): n=A,T,C or G
  unsure (52): n=A,T,C or G
  unsure (61): n=A,T,C or G
  unsure (63): n=A,T,C or G
tacttttatatttccatacaatcagaancagtnaaaaaaatttgganagnanataaaaacntnttaaa

SEQ ID NO: 8954 - DNA, 547 bp, Homo sapiens
gcccggccatcttatttattttaaaaatgtatgtatttatagatttaggaggtataagtgcagattccttacacgcatgtatcacatagtggtgaagtctgggcttttagtgtacctgtcacccaaatagtggacattgtattcaactggtaatttttcaatcctcagccaactccaacccagaaaagcactttgaaaaaatgactttggctgcagtgtagtttggaagtagcccatgctagatacaaggagcctagcaaaatattatcacagtaattcaaaggatagataatggtaggttagactagggtggtgactgtgaagatgaagagaaatgaaataaattgatcgataattaagaggtaaagttaggctgcgcatggtggctcacgcctgtaatcccagaactttgggaggctgaggtgggaagattgtccaagagttcaagaccaatctgggcaacatagtgagacctcgtctactaaaactcaaaaaaattagccgggcatagcggcacacgcctataatcccagctacctggggaggc

SEQ ID NO: 8955 - DNA, 602 bp, Homo sapiens
ctgcacatggattggttaacataatatatactgctatataatcttttaagggctaatatttgtagataatttaaaagcatgtcaatttcctctaagatttgattatttaacctgcacaaaggccaatcttcagttatcaatgacaagaaaactctagggctgccaaaataacttcattttagaccccagagttagtgttaggctggtaatgtttctaatttgggaataatgagactagaaagctaggagggccccctccaaatttctcccttgtattaggctgaagtagaacataacgtggcttaaagcataaacttaaagcatatgctttgagttttaaaaatgttaacctgtaattaattattagagtattatccatagtctactatgatagtcagttaatattctctaaatcagattatattcatttgaaaatgcatctgcatatttgcaaatgtgttattacacaagatcttacctatgtcaatttaaagaggttaaagatgcaggaagcccccactaaaatgtaaacacatttgtacggttttcagaatgtttggactcattctttcccattgacagagcagtaggttttaattaga

SEQ ID NO: 8956 - DNA, 381 bp, Homo sapiens
cctgagacctgggaggaagctggagaaaagatgccctctgaatctttgtgtttggctgcccaggctcgccttgacaccgaatggttgaaaacagatatacagatggtagtgtcgaaccaagtggaacaaagaaagaagatctgaatgacaaagagaaaaaaaatgaagacgaaactcctgcacctgtatatagggccaagtcaattctggagacctgggtgtgggtcaagcaaccaggtaatctgagttttggcactttggaaagcttgatctgacgctccttttctaaataacttggatggattattcgtattttttggtaacaattttaaaaaatgtaattaaaaaaatttaaatatcgtggtaaaatatacataccaa

SEQ ID NO: 8957 - DNA, 535 bp, Homo sapiens
  unsure (219): n=A,T,C or G
  unsure (280): n=A,T,C or G
  unsure (367): n=A,T,C or G
  unsure (384): n=A,T,C or G
  unsure (424): n=A,T,C or G
  unsure (527): n=A,T,C or G
ccagaaaggaaactgacgagcaggtcacatgatcaggagccagactcctgagttgtaactgggcccccaactttccgtgtgattattaaaagagcccttcttcttttctaaaacttagtgccaaatgctgaggagcataatgtaggtgagaattttttttttggggggggtgaaaattaagctagagcttcttgaagtacctagtttccaggggctttntattgtatttttccttatggtcctagaatgacatcaacttggaaatgaagcttttgctganaaagctggaggtgatagtggtggtgattttgggagtggagtggacgtgataatgggaccctttaagtcatctatttcccaaggtgtntatcaaatgagagcagncctaacaatatataatctgttggggttgtaactatggtangacataataacatcggcaaaatgatttaattttctgcagcaggattgaaggttgcacgcagttaaaaattatgttaaatttatttacattaatgcaaaattgncatagacc

SEQ ID NO: 8958 - DNA, 607 bp, Homo sapiens
  unsure (8): n=A,T,C or G
ccatcggngctgaaattgagcattttaaatagtacagtaggctggtatacattaggaaatggactgcactggaggcaaatagaaaactaaagaaattagataggctggaaatgcttactttctgctctcattttctttcattttgtctgctgtctttttgaatgccaatactttcatttaaaatgttttgggagcacggcaacccaaaatgactgaacggtggtccaaaaatccaaaccaactgataattacttctcgaggtgataggaaaggcacaggaagttaggactttggctgaaatgatgaaaacacatgttcgccattttagggatcagcgcctcgactcctgccacctccggctccaacgatgatcatgtttggatgtatttattgaattgtcctttgctgatgaggaatttttaaagtatttcatagaataagtcctttggtatgcagatgctacatggaaggaaagaaagaaaaaaagaaaacacacaatattacttgctccataccctaaactgccgataccacagccgtaaaatgaaggtgtctagtagttgttatagcacggtagtccattctttctaaaggaccacttacggtt

SEQ ID NO: 8959 - DNA, 570 bp, Homo sapiens
  unsure (110): n=A,T,C or G
  unsure (274): n=A,T,C or G
  unsure (372): n=A,T,C or G
caatatttctaaatcatattttgatgacaacttacaggatcagtgattgagacaatgactagtgtatcaaacgctatctgatagttttcttagcatattccgtgtgtggnggtacatttattgtggtgtgcaaaatctgacaactgacgatttttctctgtcagcaaaactaacaaatttttaaaaatgattttaatagttataactaaaataagcttagacttccaagtcagtcaaatgcccaaactgcatgttttctgccgttccccaaatncttttacatgttttaaatagcctttagaatatgatcgatcacatggctgtatttcagatctaaaagttttgagattttcaaaatcaaaaattactttnttatgcaaaatggcaatgcaaacagcaatcctacataatgtagaataatttttcttctgtacggctccttctaaaaaatgggtaaccacacacacacacacacacacacacgacataaatttagtccatctgaagaagcactccagctttctaattccacttttgaaggaaaaggcagaggcatgtttacattatccc

SEQ ID NO: 8960 - DNA, 86 bp, Homo sapiens
ggaatcatataatataggtactttgtccctgattaaataatgtgacggatagaatgcatcaagtgtttattatgaaaagagtggaa

SEQ ID NO: 8961 - DNA, 458 bp, Homo sapiens
tcgacacgatgacacacaataatttttggttgaagaagatagaaatcagtgtttcagaagcagaaaaacgaactggaagaaatgccatgaacatgcaagaaacatatactgcttacctcattgaaacaaggtcagttgaacataccgatggtcagagtgtcctaacagactcactatggcggcgatatagtgaatttgagttgttgagaagctaccttttagtttactatccacatattgttgtgccacctctgccagaaaaacgggcagaatttgtttggcataaactctctgctgacaacatggatccagattttgtggagaggcgacggattggtttagaaaactttctcttgaggattgcttcacatcccatcctttgtagagacaaaatcttctatctgtttttaacacaggaaggtaactggaaggagactgtgaatgaaactgggtttcag

SEQ ID NO: 8962 - DNA, 603 bp, Homo sapiens
  unsure (529): n=A,T,C or G
  unsure (566): n=A,T,C or G
  unsure (585): n=A,T,C or G
ccactgtgtagcaccttctaattcaatttcatcggcagttgtaataacagttccagcctcaggtgttttaatggtgggaaacatcttgattgcttctccagaaacttgaccatcggttttgttttggaaatcttggagaatctcagttccttccacagcaataagttctgtgggagaagcttccatttcttctaataactcaggtttaccatcatcttctgaaggttctaattttgtgtcaggagataaagagggaggctcagttatgtgaaggtattcctcacttgatggtttgaaagtcgcttcaatatttacatgaatttccttaaaagaatcctgtggggacattacagatgagccgacgtctattcctggcagagcactgggctgggggatctctgtgtgtccagaggcttcactgcctgagtagatagtgaggggagatgatggtgtctgagaagacaacttcgcaaatgttgaaactgctaatgttgtatcagtgtaatatgggggattggatccttccatnacatcaggcacctctgttacactctgatccataaggngggtagtagcaatacttanatagggagtatggtctac

SEQ ID NO: 8963 - DNA, 596 bp, Homo sapiens
gttgtagggttgccagatgcaatacaagattcctggttaaatttgaatttcagtaaacaatgaatagtttttcattgtaccatgaaatatccagaacatacttatatgtaaagtattatttatttgaatctacaaaaaacaacaaataatttttaaatataaggattttcctagatattgcacgggagaatatacaaatagcaaaattgaggccaagggccaagagaatatccgaactttaatttcaggaattgaatgggtttgctagaatgtgatatttgaagcatcacataaaaatgatgggacaataaattttgccataaagtcaaatttagctggaaatcctggatttttttctgttaaatctggcaaccctagtctgctagccaggatccacaagtccttgttccactgtgccttggtttctcctttatttctaagtggaaaaagtattagccaccatcttacctcacagtgatgttgtgaggacatgtggaagcactttaagttttttcatcataacataaattattttcaagtgtaacttattaacctatttattatttatgtatttatttaagcatcaaatatttgtg

SEQ ID NO: 8964 - DNA, 606 bp, Homo sapiens
ctgaaggtttttttattctttctttttttaaagtgagcccatgatttggtgtctttcccagattatcccctttgcgacaacacaagcaaaaatatttacaaaggtaaggcatagtcaaactacataaagagaaaaaatcatgaggaaaatacatgaaaaagactaaagacttcgccataacaaggtcttagtgataatagtgtccgtaaagatgtcatcagaattggtaaagtcaagcatgctgcaaatataccctttggattagaaaagagcacaattttctttttttgttttgttctgttttaagaagtggcatactgctctttctccctttggataatttcttttaagcccatcaaaggaaaaaacaaacacaattcaaacaaacactgtcaagtgattcaagatcaaatatttacaataatcaaatggagtatcagattttttttttccaaactgataccacaaatacagagctgaaatctctctttggctcctctatatgcaaaattgaattagtcttcattgaagacaattatatagtcagttccagatgcaaaaggaaacagccttacaaggccctaaagaacacatgctcctacccta

SEQ ID NO: 8965 - DNA, 243 bp, Homo sapiens
agccaatcttcattgctcaagtgtctgaagcagccatggcagaagtacctgagctcgccagtgaaatgatggcttattacagtggcaatgaggatgacttgttctttgaagctgatggccctaaacagatgaagtgctccttccaggacctggacctctgccctctggatggcggcatccagctacgaatctccgaccaccactacagcaagggcttcaggcaggccgcgtcagttgttgtgg

SEQ ID NO: 8966 - DNA, 520 bp, Homo sapiens
  unsure (469): n=A,T,C or G
cctggtgcaaatcaacaaaagtaatgggaaggagacagtggtagggagactcaacgagactcacatcttcaacggaagtaattggatcatgctgatctataaagggggtgatgaatatgacaaccactgtggcaaggagcagcgtcgtgcagtggtgatgatctcctgcaatcgacacaccctagcggacaattttaaccctgtgtctgaggagcgtggcaaagtccaagattgtttctacctctttgagatggatagcagcctggcctgttcaccagagatctcccacctcagtgtgggttccatcttacttgtcacgtttgcatcactggttgctgtttatgttgttggggggttcctataccagcgactggtagtgggagccaaaggaatggagcagtttccccacttagccttctggcaggatcttggcaacctggtagcagatggctgtgactttgtctgccgntctaaacctcgaaatgtgcctgcagcatatcgtggtgtgggggatgaccag

SEQ ID NO: 8967 - DNA, 596 bp, Homo sapiens
  unsure (13): n=A,T,C or G
  unsure (47): n=A,T,C or G
  unsure (49): n=A,T,C or G
  unsure (58): n=A,T,C or G
  unsure (63): n=A,T,C or G
  unsure (81): n=A,T,C or G
  unsure (155): n=A,T,C or G
  unsure (196): n=A,T,C or G
  unsure (211): n=A,T,C or G
  unsure (267): n=A,T,C or G
  unsure (281): n=A,T,C or G
  unsure (282): n=A,T,C or G
  unsure (332): n=A,T,C or G
  unsure (372): n=A,T,C or G
  unsure (520): n=A,T,C or G
  unsure (521): n=A,T,C or G
  unsure (551): n=A,T,C or G
  unsure (579): n=A,T,C or G
  unsure (585): n=A,T,C or G
  unsure (586): n=A,T,C or G
caaaacgcagcantatgactgcaaatggtacattccgctcacggatntnagcttccanatggnggatgaactggaggcagngcccaacatccccctggtgcccgatgaggagctggacgctttgaagatcaagatctcccagatcaagaatgacntccagagagagaagagggcgaacaagggcagcaaggctacngagaggctgaagaanaagctgtcggagcaggagtcactgctgctgcttatgtctcccagcatggccttcanggtgcacagccgcnncggcaagagttacacgttcctgatctcctctgactatgagcgtgcagagnggagggagaacatccgggagcagcagaagaagtgtttcanaagcttctccctgacatccgtggagctgcagatgctgaccaactcgtgtgtgaaactccagactgtccacagcattccgctgaccatcaataaggaagatgatgagtctccggggctctatgggtttctgaatgtcatcgtccactcnnccactggatttaagcagagttcaaatctgnactgcaccctggaggtggattcctttgngtattnngtgaataaag

SEQ ID NO: 8968 - DNA, 601 bp, Homo sapiens
  unsure (63): n=A,T,C or G
  unsure (195): n=A,T,C or G
  unsure (241): n=A,T,C or G
  unsure (598): n=A,T,C or G
caccatattggccaggttggtctcgaactcaccatattggcctcaggtgatccgcccgcctcngcctcccaaagtgttgggattatgggcgtgagccagccacggtgcccggcctgttttattgtttgaaaaacaagtacaggttgttattatccaagaattgttgatagagtatatactgtatttgaagtgtanaactgaggcagaggctgattaatataactagtttacatttgttagnctttcacatctgtgaaggaataaagtacagacaaaagtggaaaacaaaccaggaaaaacaaattgtgaagcacagagctgcttaaaagaaaaaagtcacagaaataagtcagtattttgtttagagactagaactccaactgctagccaactgcctagaatatagtaaatattttctagtttcttaaatgactagtaatattcctacattatgtgatggcatttcccaaactgtttaattagatgttagatttgtagccaaatatgtctaggaaatgcttaaacaatataaaacagttttaatgattggctttttagaacgttatatattagtgtgctttatgcatatccaagaggngag

SEQ ID NO: 8969 - DNA, 457 bp, Homo sapiens
ggtgggcgcgccttaatgataaggagggatatgttccacgtaacttgctgggactgtacccaagaattaaaccaagacaaaggagcttggcctgaaacttccgcacagaattttagtcaatgaagaattaatctctgttaagaagaagtaatacgattatttttggcaaaaatttcacaagacttattttaatgacaatgtagcttgaaagcgatgaagaatgtctctagaagagaatgaaggattgaagaattcaccattagaggacatttagcgtgatgaaataaagcatctacgtcagcaggccatactgtgttggggcaaaggtgtcccgtgtagcactcagataagtatacagcgacaatcctgttttctacaagaatcctgtctagtaaataggatcatttattgggcagttgggaaatcagctctctgtcctgttgagtgttttcagcag

SEQ ID NO: 8970 - DNA, 485 bp, Homo sapiens
ctgcctttgctaaaagtgctgccatgttaggtaattctgaggatcatactgctttatctagagctttgtctcagcttgcagaggttgaggagaagatagaccagttacatcaagaacaagcttttgctgacttttatatgttttcagaactacttagtgactacattcgtcttattgctgcagtgaaaggtgtgtttgaccatcgaatgaagtgctggcagaaatgggaagatgctcaaattactttgctcaaaaaacgtgaagctgaagcaaaaatgatggttgctaacaaaccagataaaatacagcaagctaaaaatgaaataagagagtgggaggcgaaagtgcaacaaggggaaagagattttgaacagatatctaaaacgattcgaaaagaagtgggaagatttgagaaagaacgagtgaaggattttaaaaccgttatcatcaagtacttagaatcactagttcaaacacaacaacag

SEQ ID NO: 8971 - DNA, 380 bp, Homo sapiens
ccaaggctttatattgttgctgtgtaacaacttacctcaatacttaagagcagttcagagaaacaaaccagcatctatgggtcagcaattgggagcaacttaactgattctgggtaaagctcaaggttccaatcacagaaaactaggattggagaatttttttaatatccagagtggcatactaacagctttaaagttaatcctggttgtcatcttccctcggtgagtgatttgagcaagaaaagctgtaaattgaacacgctctacgaagtagtcgtgctatcttgcatcctttatggtcacagaatgtggtgggagggttcttttccctggtacaattaccaagcaggcagggagcattgggaactctcagatgccag

SEQ ID NO: 8972 - DNA, 297 bp, Homo sapiens
ccactgaactgcgctgccagtgtttgcagaccctgcagggaattcaccccaagaacatccaaagcgtgaacgtgaagtcccccggaccccactgcgcccaaaccgaagtcatagccacactcaagaatgggcggaaagcttgcctcaatcctgcatcccccatagttaagaaaatcatcgaaaagatgctgaacagtgacaaatccaactgaccagaagggaggaggaagctcactggtggctgttcctgaaggaggccctgcccttataggaacagaagaggaaagagagacacag

SEQ ID NO: 8973 - DNA, 478 bp, Homo sapiens
  unsure (312): n=A,T,C or G
ctgaaccctcgtggagccattcatacaggtccctatttaaggaacaagtgattatgctacctttgcacggttagggtaccgcggccgttaaacatgtgtcactgggcaggcggtgcctctaatactggtgatgctagaggtgatgtttttggtaaacaggcggggtaagatttgccgagttccttttactttttttaacctttccttatgagcatgcctgtgttgggttgacagtgagggtaataatgacttgttggttgattgtagatattgggctgttaattgtcagttcagtgttttaatctgacgcangcttatgcggaggagaatgttttcatgttacttatactaacattagttcttctatagggtgatagattggtccaattgggtgtgaggagttcagttatatgtttgggattttttaggtagtgggtgttgagcttgaacgctttcttaattggtggctgcttttagg

SEQ ID NO: 8974 - DNA, 366 bp, Homo sapiens
ccttctcccctcctccagagagggggcaggtgaggggctatcaggaacacgctccttaataactgatgtctcaactctggatgggggactctgaacttgtgctgctgctgccatatttgcaatggtgctgaggtggttcatctggctcattgccatggtgacagatgctggaggtaggctgacaggaattagggggtggggcatcatcataaaaggaagttccagtccgacacttgaattcatgtccccgttttcagagtctgctccatgttggttattactggcatgatagttgctcatggcttctaatttgattttttttcaccttcattgcttcagcaatagctgcattggtagcagcagcag

SEQ ID NO: 8975 - DNA, 406 bp, Homo sapiens
tttttatttagcgatgttttatttagctgaaatgttatttcacttgtaaaaactatctccggttacaaaaaaaaatcagaaaccttattaaatttaacctgcttttacaaatgtcctaagaagtcttaagctaaacaaaatttaagtaggaaaacgataatttaaaaatagtgtgttatactatttctgtggtttatgtacatatattaactggtctcttggataggaaacatgactagaagtttatcacactaagcactgtaaaataaaggcaagagctaatcatcttctagaaaaatagtctctatgcaacaattgcaaatgtcaaagctattatttagtagttaattgcctgctacaatacataaaacaaagtacatttactggattgtttttcagtttgcag

SEQ ID NO: 8976 - DNA, 559 bp, Homo sapiens
ccaaaagattgacagtcctgggttgtccagcctggagattgcctttgtggaattgccagaattggtattgctgtatttgggattctgaatcttggcataacagttttggcactttctccacctgagcttgctgtccttcggcttgaacattttggaattgtcctttcggggatttcttctcttgggccggctggtcttcagtttgctgatcctgggtttgcttctttgagttttgctccttatcagtctgctggtctttaacttgtctatctttagattgtccttctgggtattgttcccctttggcttgctgatcttcagcttgctgatctgggagttgctctttagtttgattaagttgagcttgcttatctacggagtgcctctttggggatagccagtctttgatttgctggtctaaggatttctgctttggagattgccagcctttgctttgctgatctaaggaatgcctctttgaggatttctggcctttggcttgcacgtctaaagaatgtctccttaagtattgcaaggctttggtttgctggtttaagga

SEQ ID NO: 8977 - DNA, 502 bp, Homo sapiens
ccaagaagcaacagagatataaagctgaatcttgtagctaacccctgaaagcaagccaacgcaaattcctccgccaggccagtcttctagtgccaatatggagactgtgggccacagaagattcccttctatttcaggttctcaaaaagtggtgtagactcaggcaaatgccaggaaatgtgtccatatgccagaggagacacagagccagaaatgaaggctatgggtcctgtcttcagtgaaacactgaacgctctcggaaagctcccatcattcttgcatcgctactgccaccaagacggtggcaagggaggaggctaactttcaaatgcatgcaacggcaggtaatatactgtggaagctggaggtttacttttcatgttttagttactttcttgcaaacagcagtccaggaaagcaagcaagcaggtaaaactccgggtgtgcatgaggagatgatccaaggccagtgggcctcccagtgagaaccaaacaggagtgg

SEQ ID NO: 8978 - DNA, 556 bp, Homo sapiens
  unsure (508): n=A,T,C or G
cctaacccctgggagggtaaatgtgggtttctagaatactaagtaaatttgactaacaatgccaaaatgccccctgcctgttttgggacgtttacctcagtccctaatgggcttcagacctgaaaaatgcaatgtctggtttgggcactttgggcctgtaagccttcttggtgaagagcagaaactttgcagtaacaccttcagtgagttcaaggctaggatccctgtcaacattatttaatctctttgagctttagcaaaatagggtagataatggtagttatttcatagggttgtgtgcagcttaagggagatcatgaatggacatttctaacccaatgtgacaatcagtgaccaatatgttttggctttttcaaaccaagaatctagttgagtccacagccacttctttcttgaaaaaaaaaaaaaaaagcattcaggagtgcaagttttctgctatagaaggcagtgggtacagacagaccttccctgagtggagggctggganagagtctgcatggggacatccctccaagcaacttcagagtgacagaag

SEQ ID NO: 8979 - DNA, 360 bp, Homo sapiens
ctgtctcttacttttaaccagtgaaattgacctgcccgtgaagaggcgggcataacacagcaagacgagaagaccctatggagctttaatttattaatgcaaacagtacctaacaaacccacaggtcctaaactaccaaacctgcattaaaaatttcggttggggcgacctcggagcagaacccaacctccgagcagtacatgctaagacttcaccagtcaaagcgaactactatactcaattgatccaataacttgaccaacggaacaagttaccctagggataacagcgcaatcctattctagagtccatatcaacaatagggtttacgacctcgatgttggatcaggacatcccaat

SEQ ID NO: 8980 - DNA, 224 bp, Homo sapiens
ctggtgttaatggcatgcaggcatatgtgatgccaaccatgagggctggaagaaccagaagccaaagaagaatatgaccgcatctattctaaagctactgtggtggtttctcatgcttcagagtctcgtaagtctcctggttcctggtgctcaggcccgtgtaaacaccatctgatttctcatagctggttatagctgcctttcgcacttggatcttcagtcga

SEQ ID NO: 8981 - DNA, 593 bp, Homo sapiens
ctggtttcagtgaaactgccaaaatcctcaagccaggaagtagaagccaaggagctgtcctttgttttggattacataaaccagtcacccaagtgcattgcctttggaaacgagggagtatatgttgctgcagtacgggaattttacttgtctgtttattttttcaaaaagaaaacaacatcaaggtttactttatcatcatcaagaaataagaagcatgctaaaaacaattttacgtgtgtagcatgtcacccaacggaagactgcatcgcatctggtcacatggatggcaaaattcgtctttggaggaatttttatgatgataagaaatatacgtacacatgtttacattggcaccatgatatggttatggatttggctttttcagtgacaggcaccagtctgctgagtggcggtcgtgaatctgtacttgtagagtggcgcgatgcaacagagaagaataaggagtttctcccgcgtttaggagctactattgaacatatctcagtctcgcctgcaggagatttattctgcacttctcactctgataataagataataattattcaccgaaaccttgaagcatccgcagt

SEQ ID NO: 8982 - DNA, 591 bp, Homo sapiens
ccatatccttgtctaaaatgtatattgaacaaaatgcatgctcttgaaatgtctcaaaaccttacaccctgggaataattgcatatataacttgtgtttggagaatcacatgaactttaatcagggtaatagcactttcaaacttgctagtagattttactgtaggtgtaatgccttaatcatctttttgaatgttttctcagagctggaggttgctgggcacctaaatgatgtttcatgatagctttgggtgattttactgctatttataatttgctgtataaagtgagcattacttaatttgcaagctgatttctcacagtgtaaatttgttcattcctggtagtctattttctataaaaatgtatttttgcacaacatttttaaaaactggtgtaccttcatctatgacgtgttccattttgacaaacagctttcaggcgtaaatccagagaagtgctttatatgaaatgtattattttgaacagagtttgtgatttggtagttattttatgttgttgaaatttgaatttcacaattcttagataattatttcaaatggatattgatgcattcttgttaccagatgtt

SEQ ID NO: 8983 - DNA, 582 bp, Homo sapiens
cctagtagtggggtgaggcttggattagcgtttagaagggctatttgttgtgggtctcatgagttggagtgtaggataaatcatgctaaggcgaggatgaaaccgatatcgccgatacggttgtataggattgcttgaatggctgctgtgttggcatctgctcgggcgtatcatcaactgatgagcaagaaggatataattcctacgccctctcagccgatgaacagttggaataggttgttagcggtaactaagattagtatggtaattaggaagatgagtagatatttgaagaactgattaatgtttgggtctgagtttatatatcacagtgagaattctatgatggaccatgtaacgaacaatgctacagggatgaatattatggagaagtagtctagtttgaagcttagggagagctgggttgtttggattgtggctcagtgtcagttcgagataataacttcttggtctaggcacatgaatattgttgtggggaagagactgataataaaggtggatgcgacaatggattttacataatgggggtatgagttttttttgttagggttaacgagggtg

SEQ ID NO: 8984 - DNA, 549 bp, Homo sapiens
  unsure (506): n=A,T,C or G
ccagttttcttccttggagtagcaatctgtaaaaataagtgctgctgtttaaaaagtagcatgccctacaccataccaatgtattagtgagaatttggcgattctcaccaaacaacaatgaagtttcacatttggtactggatggagcttgggttagatctgccttttaaggcaaagtcaactctttcaacttaattctttttcaagggagtaatgtactgtctacacttggcttaaactaacttctattatggactactttcaatgtacatgtaaatattcatgcatcagaagccaatttcttttaacagtacatagaaaaggtatattttggggtgctaatgaacacttcaaattaagtaatgatattggtaaggatcaaactgcactattagtcttgttaataccacactggcacacacactgcatatatatgtattttcctaagataaaactcttctcagaatttcattactttttattatacaccaactagtttatattgnagttctttacaaagaaaatgctaagaaaaattataatcacatg

SEQ ID NO: 8985 - DNA, 270 bp, Homo sapiens
ctggtgtttatccgtcactcgccgaggttccttgggtcatggtgccagcctgactgagaagaggacgctcccgggagacgaatgaggaaccacctcctcctactgttcaagtacaggggcctggtccgcaaagggaagaaaagcaaaagacgaaaatggctaaattcgtgatccgcccagccactgccgccgactgcagtgacatactgcggctgatcaaggagctggctaaatatgaatacatggaagaacaagtaatcttaactgaaa

SEQ ID NO: 8986 - DNA, 507 bp, Homo sapiens
  unsure (7): n=A,T,C or G
  unsure (26): n=A,T,C or G
  unsure (41): n=A,T,C or G
  unsure (64): n=A,T,C or G
  unsure (78): n=A,T,C or G
  unsure (90): n=A,T,C or G
  unsure (99): n=A,T,C or G
  unsure (111): n=A,T,C or G
  unsure (161): n=A,T,C or G
  unsure (172): n=A,T,C or G
  unsure (192): n=A,T,C or G
  unsure (211): n=A,T,C or G
  unsure (217): n=A,T,C or G
  unsure (221): n=A,T,C or G
  unsure (344): n=A,T,C or G
  unsure (351): n=A,T,C or G
  unsure (353): n=A,T,C or G
  unsure (393): n=A,T,C or G
  unsure (394): n=A,T,C or G
  unsure (396): n=A,T,C or G
  unsure (415): n=A,T,C or G
  unsure (416): n=A,T,C or G
  unsure (435): n=A,T,C or G
  unsure (440): n=A,T,C or G
  unsure (463): n=A,T,C or G
  unsure (476): n=A,T,C or G
  unsure (482): n=A,T,C or G
  unsure (496): n=A,T,C or G
  unsure (503): n=A,T,C or G
attgacngtcctgggttgtccagccnggagattgcctttgnggaattgccagaattggtattgntgtatttgggattntgaatcttggcntaacagttntggcactttctncacctgagcttgctgtccttcggcttgaacattttggaattgtcctttcngggatttcttntcttgggccggctggtcttnagtttgctgatcctgggtntgcttntttnagttttgctccttatcagtctgctggtctttaacttgtctatctttagattgtccttctgggtattgttcccctttggcttgctgatcttcagcttgctgatctgggagttgctctttagttngattaantngagcttgcttatctacggagtgcctctttggggatagccnntntttgatttgctggtctaanngatttctgctttggagatngccancctttgctttgctgatctaaggnatgcctctttgangatttntggcctttggcttncacgtcnaaag

SEQ ID NO: 8987 - DNA, 364 bp, Homo sapiens
  unsure (17): n=A,T,C or G
  unsure (161): n=A,T,C or G
  unsure (185): n=A,T,C or G
  unsure (189): n=A,T,C or G
  unsure (203): n=A,T,C or G
  unsure (213): n=A,T,C or G
  unsure (219): n=A,T,C or G
  unsure (324): n=A,T,C or G
cctattctgaactgcanatgctgtcccccagcgagcggcagtgtgtggagacggtggtcaacatgggctactcgtacgagtgtgtcctcagagccatgaagaagaaaggagagaatattgagcagattctcgactatctctttgcacatggacagctttgngagaagggcttcgaccctcttttngtgnaagaggctctgganatgcaccagngttcanaagaaaagatgatggagtttcttcagttaatgagcaaatttaaggagatgggctttgagctgaaagacattaaggaagttttgctattacacaacaatgaccagnacaatgctttggaagacctcatggctcgggcaggagccag

SEQ ID NO: 8988 - DNA, 325 bp, Homo sapiens
  unsure (24): n=A,T,C or G
  unsure (45): n=A,T,C or G
  unsure (141): n=A,T,C or G
  unsure (148): n=A,T,C or G
  unsure (163): n=A,T,C or G
  unsure (177): n=A,T,C or G
atcacattctcgatccagaggaangcgatactctcgctcacgcancaggagcaggggacgaaggtcaaggtcagcatctcctcgacgatcaagatctatctctcttcgtagatcaagatcagcttcactcagaagatctangtctggntctataaaaggatcnaggtatttccaatncccgtcgaggtcaagatcaagatccaggtctatttcacgaccaagaagcagccgatcaaagtccagatctccatctccaaaaagaagtcgttccccatcaggaagtcctcgcagaagtgcaagtcctgaaagaatggactgaagctct

SEQ ID NO: 8989 - DNA, 426 bp, Homo sapiens
ccagtcaacatctacagactagaagggagaaaagaagtcattaaaacagatattactgttgtggtaagcatttgctggtaatgctgtataaatttaatagttttaatatagtgcaacagaagaaactgcatttgaagaaaagagctattgaataccataaattaaccctcaagtctgttctaggtattcttgggcctgaggtcttctgaattaattgagtagcagtatttggctactcagttggttattaactgtgctttttgactgataagagaatacatttaaattttttaaatggtatttatggggccaggtgtggtggctcacacctttaatcccagcactttgggaggccgatcaattatatagatcaacatgatcaaggtgggcagaccactcaaagtcaagagttcaagaccagcctgg

SEQ ID NO: 8990 - DNA, 494 bp, Homo sapiens
ccttatttctcttgtcctttcgtacagggaggaatttgaagtagatagaaaccgacctggattactccggtctgaactcagatcacgtaggactttaatcgttgaacaaacgaacctttaatagcggctgcaccatcgggatgtcctgatccaacatcgaggtcgtaaaccctattgttgatatggactctagaataggattgcgctgttatccctagggtaacttgttccgttggtcaagttattggatcaattgagtatagtagttcgctttgactggtgaagtcttagcatgtactgctcggaggttgggttctgctccgaggtcgccccaaccgaaatttttaatgcaggtttggtagtttaggacctgtgggtttgttaggtactgtttgcattaataaattaaagctccatagggtcttctcgtcttgctgtgttatgcccgcctcttcacgggcaggtcaatttcactggttaaaagtaagagacag

SEQ ID NO: 8991 - DNA, 376 bp, Homo sapiens
ccatcaactggaactatgtcattatttataaaacaggagcaatcacagggctgtggtgagaatcacatgaggtgacacatgtgaaatggtcctttcccctaagacatatataattgtgacaaggaacaaaatttacatagaaaataattacagaacaacgtaggaccatgtcttcatttctccctggagcggatgtaaaataaggtgattgatttgagcaagcatgttatgaatatttagaaatgtcttctagggaagcaagctggcgctcaccgattttggtttgccaggcatatcagaaggcactttgtgacaggtgcagtagggacgcggagtgatctcttcacgtgtaggcaatgcccagcccacacctagg

SEQ ID NO: 8992 - DNA, 173 bp, Homo sapiens
ccatgggggacgtgctgtccacgcacctggacgacgcccggcgccagcacatcgcagaaaaaaccgggaagatcctgacggagttcctccagttctatgaagaccagtatggcgtggctctcttcaacagcatgcgccatgagattgagggcacggggctgccgcaggcccag

SEQ ID NO: 8993 - DNA, 599 bp, Homo sapiens
cctaagtaaatgaagagctgtaccatattcatgtattggaagacaacattgtaaagatgacatggtttaccagattaatctataaattcaatacaaatccaatcaaaatttcaatgctcttgggtttgtttgatttataaattgttggtctaattctagaagtaatatggaggaacagttggctaagaatagccaagacactccaaggaagaacaattttgtggtgatactggagacagaggtgaaattggttacaattatgacaaaatgtggaggcatcttggtttttatcagaccttttcctaaagttgcaataatcaggactgtactgtactgctacaagattagacaaattgatgtcagtcagaatagaaaccatcaaaagacccacacacatacacaaaaatttaatttatgaaagaggcagtgttacaaatcactggggaaaggatgaacttttcagtaaatagtgcagagacaaccacttcgaatatgaaaaatgttaagttgaatttctaactcataattttcacaaaaatcagttcaggacagactaaagacaaatgtgaaaggcaaaactataaaatttccacaaggca

SEQ ID NO: 8994 - DNA, 597 bp, Homo sapiens
  unsure (592): n=A,T,C or G
ccaagaacctcttccaccgggccatttctgagagtggcgtggccctcacttctgttctggtgaagaaaggtgatgtcaagcccttggctgagcaaatttctatcactgctgggtgcaaaaccaccacctctgctgtcatggttcactgcctgcgacagaagacggaagaggagctcttggagacgacattgaaaatgaaattcttatctctggacttacagggagaccccagagagagtcaaccccttctgggcactgtgattgatgggatgctgctgctgaaaacacctgaagagcttcaagctgaaaggaatttccacactgtcccctacatggtcggaattaacaagcaggagtttggctggttgattccaatgcagttgatgagctatccactctccgaagggcaactggaccagaagacagccatgtcactcctgtggaagtcctatccccttgtttgcattgctaaggaactgattccagaagccactgagaaatacttaggaggaacagacgacactgtcaaaaagaaagacctgttcctggacttgatagcagatgtgatgtttggtgtcccatctgtgattgnggccc

SEQ ID NO: 8995 - DNA, 568 bp, Homo sapiens
cctggtcatagaagtgtaaacaatgtaaatgaatccaccattaccagttgtcatatcatatctatgtcacctgtgtattctgagattacacacatacctgccaatatacctgggaaaggttattttatcacagttacacttgagttcttggcaggcaggactgaggaagagtaatttgaaagaagttttacatcctatttagaagaaatcactagtatttccttaaataacaggttacaatagaaagatactgcctggaagttatcctttcactttggttcatttttagtttttctttatgatttacatagctgtttaattcatttgcttatagtacaatcctgccataaagtattaaagcacaagatacctattattccttcaacatctgcatttttcaagttttatactctacatccacagtacgtcagcagttcttgaatgtttaaaaaaataaatgggtaaaatgcttctaaaaaatgcagatgtttataactacaatggtactaagatgggaaggagacaatgagagaagggataaaagcaaacatgttcatgtgcagggaat

SEQ ID NO: 8996 - DNA, 436 bp, Homo sapiens
ctgagaatcctgggggagaaagaggccaagctggcccagcagagccaggccctacaggagctcatctcagagctagatcgaaggtgccacagctcagcactggaactgctgcaggaggtgataattgtcctggaaaggagtgagtcctggaacctgaaggacctggatattacctctccagaactcaggagtgtgtgccatgtgccagggctgaagaagatgctgaggacatgtgcagtccacatcactctggatccagacacagccaatccgtggctgatactttcagaagatcggagacaagtgaggcttggagacacccagcagagcatacctggaaatgaagagagatttgatagttatcctatggtcctgggtgcccagcactttcactctggaaaacattactgggaggtagatgtgacaggaaaggagg

SEQ ID NO: 8997 - DNA, 599 bp, Homo sapiens
  unsure (538): n=A,T,C or G
cctttctcaatttacagagttgaagaggaaaggcaaatggaggaataaacttcattgtcattgggattaatttggctagactcaatctcttgagccttaaaatgagaaagtaatatccattacatgtttagagttctcaaatagttgatactattattaaatgtttcaaattttattggggtagatactaaaaattagtacactgtcctaatgaagtttaaatgaacaagttttacatttcttaggattcaggaatatatggaatctagttgtatttaattgacttgagagccacagagattgtgttgatttatgagctggactcctattgttttagaaacatgcagtaatgattaacttgtgtcaatgatggtaatgagaccaaacttgtacatttaattaagggtaccagttctttttatgttactagactataccttggcctttaaaaatgaatctcactgattaaagagaacaggcattattaggatagcattccaccacaactagaaacattcaaataatgtgtcttaattgnaatctgtatataggaaaatttttcctatggatatttttggtgttttaccacagtgaactga

SEQ ID NO: 8998 - DNA, 411 bp, Homo sapiens
ctgtcctcacgggcccctggagaaaccgcaggtacacagatgaaggcatggacaggagaagaggggacccggggttgagaataagatagaaggcaaagagaactggggagcagaggagagaggagaaaaatgacacctccggtattgactgctcagtggtacctactggcgctaagcacagtaaaaacacaaaggctactttccaaaaggaaaacaacatcatttaaaaagaaaaagaaaaaaaaccaaaacagccctattcgcccatgagtgtgggaagtgaggaaattatataatacgcctcctccaaggaccccaaacaccctctctgctgtaattaagagaagtgcttactgccagcaccgtcctgccatacctgcttgtgtgactttgaacaagtgtcttatcctc

SEQ ID NO: 8999 - DNA, 381 bp, Homo sapiens
tcgacatttgggggcaagggttccactgaaaaatcccccaaattcacgctgaggtttcaggtcatggttgctgaggtggaagatgaggtcagggctcttggagattttccaacccaccctagaacttgtttctaaatggctggggaagaggtcagtataggtccccccgttactgcagatgaaggcagaagtcattctctcccccacccctcaacttcttcagagatgtggagataggaggcttcgatctctaattgcctacgatctcttaaaaatataaaacacgtgcagttgactttggtacaaaaaagaaaacaaaagaacaacaaaacattctggtccctgtgggttttttccctcacccccaacaaaccattatgg

SEQ ID NO: 9000 - DNA, 372 bp, Homo sapiens
ctgcggttcaagaaaaggtccaaaggaggacccactcgaggtgaggataaatcacaattgtgatcacagaccaggtttctatcttttttattccctttaataaattgggcttgacctgaaactccaagaaagttaatttataacagccaaaataattttttttacgtaacagcccacctttctttttcttttaaacttaaaccattatgacaaatggagatttattacataccataaacacatgtggcttgagcactggtatttagtctggaaactcagatggggcagtaagctgctgctgcaatcaggaaatgccatgtgacattcttgataaagacgaaacacacacacattccacagcacttattgtgg

SEQ ID NO: 9001 - DNA, 375 bp, Homo sapiens
ccatcaactggaactatgtcattatttataaaacaggagcaatcacagggctgtggtgagaatcacatgaggtgacacatgtgaaatggtcctttcccctaagacatatataattgtgacaaggaacaaaatttacatagaaaataattacagaacaacgtaggaccatgtcttcatttctccctggagcggatgtaaaataaggtgattgatttgagcaagcatgttatgaatatttagaaatgtcttctagggaagcaagctggcgctcaccgattttggtttgccaggcatatcagaaggcactttgtgacaggtgcagtagggacgcggagtgatctcttcacgtgtaggcaatgcccagccgacacctag

SEQ ID NO: 9002 - DNA, 596 bp, Homo sapiens
ctgcacatggattggttaacataatatatactgctatataatcttttaagggctaatatttgtagataatttaaaagcatgtcaatttcctctaagatttgattatttaacctgcacaaaggccaatcttcagttatcaatgacaagaaaactctagggctgccaaaataacttcattttagaccccagagttagtgttaggctggtaatgtttctaatttgggaataatgagactagaaagctaggagggccccctccaaatttctcccttgtattaggctgaagtagaacataacgtggcttaaagcataaacttaaagcatatgctttgagttttaaaaatgttaacctgtaattaattattagagtattatccatagtctactatgatagtcagttaatattctctaaatcagattatattcatttgaaaatgcatctgcatatttgcaaatgtgttattacacaagatcttacctatgtcaatttaaagaggttaaagatgcaggaagcccccactaaaatgtaaacacatttgtacggttttcagaatgtttggactcattctttcccattgacagagcagtaggtttta

SEQ ID NO: 9003 - DNA, 599 bp, Homo sapiens
  unsure (547): n=A,T,C or G
cctatgcatagttaataaggttataatctactcaacatggaaaatggagcctatttgcaaacacacaagtaattaaagtaccaattctctcttagtttctttttttatagttggtttattttgcaattataaatgttaaacatccctagagatgaaagttaaaatggttgatcacagatcagtagcaaaatacaaattgacaattcaaaattataaataaaactctgttgaggatgtttaactttgagtctccaaatttaagagctaagcttggaagaaacaaatttataggttatatttccctcttaaattaaaaaacaaacttcctctggcagtagtttgtgaattcctttcattgtaatgataccatgattacaggatcaaaaatgcttaacttacttgccattctgctcacatcatcacagttgtttttttttttttaagcactcaatgtaggcattttaatcttctggataacagagtatcttttgagaaattaaaatcgaattgaccatttgcaatatttggttttcctaataggtactgncttagtaaatgtttaaatccaaacaaatcttctgttcaccggaaaaatacta

SEQ ID NO: 9004 - DNA, 602 bp, Homo sapiens
ctgtagtgcccccccctccactttggtaaacgactcaagttccatgaggactttcacttctttatttataatcacagaagtgaggtgttacttcacacacatacacacacaaagaatgaaataaagaaatgaaactcgctaagcagacaaaaacagacaactttctgcttagaaaacagccttctcggtgggagaggatgaactgccatgtctaagagaaagacttgcccccgaatttgtaggtctgtaactgaccaagttttgtaattattaacaggtatttgccaagtcctaattgctgaatataatgaattggaactagatgcgaaaatagagcaggacctctccccttgatgagtttttattccagccatataattctcaataaaacttttcctgggctggatagcaaaggacacctttggttacctgaatgaacaggtacaggggaaattatttgggggagggaaaaaggagagaaaagcaaggagagagagtgtgagtgtaagagaaagtgaagaagccactcttgagaaaagcttgccataaaggagctaaacccacctgaaattcctacccacggacaccccttctcacttcag

SEQ ID NO: 9005 - DNA, 390 bp, Homo sapiens
aaacagaggcttgcgataggcttttggctcatcgagtggaaaccaaaatgaagggaaataaagtgaatgaggtgctgaatagactgcacctggctatcccaaccaggagggacgataagaagaggccccctttcatccctgaaggagtggtggctcgcaggaagaggatggaaactgaggagtccaggaagaagagggaacgagatcttgagctggaaatgggagatgattatattttggatcttcagaagtactgggatttaatgaatttgtctgaaaaacatgataagataccagaaatctgggaaggccataatatagctgattatattgatccagccatcatgaagaaattggaagaattagaaaaagaagaagagctgagaacag

SEQ ID NO: 9006 - DNA, 589 bp, Homo sapiens
ctgcacgcagccatggctgacacattcctggagcacatgtgccgcctggacattgattcaccacccatcacagcccggaacactggcatcatctgtaccattggcccagcttcccgatcagtggagacgttgaaggagatgattaagtctggaatgaatgtggctcgtctgaacttctctcatggaactcatgagtaccatgcggagaccatcaagaatgtgcgcacagccacggaaagctttgcttctgaccccatcctctaccggcccgttgctgtggctctagacactaaaggacctgagatccgaactgggctcatcaagggcagcggcactgcagaggtggagctgaagaagggagccactctcaaaatcacgctggataacgcctacatggaaaagtgtgacgagaacatcctgtggctggactacaagaacatctgcaaggtggtggaagtgggcagcaagatctacgtggatgatgggcttatttctctccaggtgaagcagaaaggtgccgacttcctggtgacggaggtggaaaatggtggctccttgggcagcaagaagggtgtgaaccttcctgggg

SEQ ID NO: 9007 - DNA, 380 bp, Homo sapiens
caaacatgatcatcgttggagccggaggtggcaggagtcgaggcgctgatccctaaaatggcgaacatgtgttttcatcatttcagccaaagtcctaacttcctgtgcctttcctatcacctcgagaagtaattatcagttggtttggatttttggaccaccgttcagtcattttgggttgccgtgctcccaaaacattttaaatgaaagtattggcattcaaaaagacagcagacaaaatgaaagaaaatgagagcagaaagtaagcatttccagcctatctaatttctttagttttctatttgcctccagtgcagtccatttcctaatgtataccagcctactgtactatttaaaatgctcaatttcagcaccgatgg

SEQ ID NO: 9008 - DNA, 218 bp, Homo sapiens
  unsure (11): n=A,T,C or G
  unsure (35): n=A,T,C or G
  unsure (124): n=A,T,C or G
  unsure (173): n=A,T,C or G
  unsure (183): n=A,T,C or G
  unsure (186): n=A,T,C or G
ccatcatcctnttcccctttgggttcatttgctgntttgccttgaggaagcgacgatgccccaactgtggagccaccttcgcttaaagggaacaccaggcccggctttcctacacccagctctntttttctaatgtaaatgttgtgtacaatagttttatttgattaagcttnaggactgttntgnaaagcgaggtgggaccgatgtggcacacgcca

SEQ ID NO: 9009 - DNA, 364 bp, Homo sapiens
  unsure (14): n=A,T,C or G
  unsure (130): n=A,T,C or G
  unsure (321): n=A,T,C or G
gtatatcttctttnatgaacatctctttaaaagttttgtaccatttttaaggtcaggttatttatttatcatcagttgtagcagttctttatgtattctggaaccaagtctattggattccaaatacggnattttctttgtatatatggtaaatagaatactttctcttttaagtcataagatatattttaagatattaaatgactaaaattatttaggtcataagttaaatatttttttcctgtggtggtattttttaatcccttctttccacctagtcactttttggaatatctgtagcaataatagtaggaacagtanatgtgcctttggagtgaaaataaatagccatttaaaacatagg

SEQ ID NO: 9010 - DNA, 597 bp, Homo sapiens
ctgggaagccacgagaatattgtgaacctgctgggggcgtgcacactgtcaggaccaatttacttgatttttgaatactgttgctatggtgatcttctcaactatctaagaagtaaaagagaaaaatttcacaggacttggacagagattttcaaggaacacaatttcagtttttaccccactttccaatcacatccaaattccagcatgcctggttcaagagaagttcagatacacccggactcggatcaaatctcagggcttcatgggaattcatttcactctgaagatgaaattgaatatgaaaaccaaaaaaggctggaagaagaggaggacttgaatgtgcttacatttgaagatcttctttgctttgcatatcaagttgccaaaggaatggaatttctggaatttaagtcgtgtgttcacagagacctggccgccaggaacgtgcttgtcacccacgggaaagtggtgaagatatgtgactttggattggctcgatatatcatgagtgattccaactatgttgtcaggggcaatgcccgtctgcctgtaaaatggatggcccccgaaagcctgtttgaaggcatctacacc

SEQ ID NO: 9011 - DNA, 599 bp, Homo sapiens
ccatagaggacgtggaggattcaatatgcgtggtggaaatttcagaggaggaggcaagttaattttgagtgttctgtatttagttcaggatcgaaacaagtgataattttatagtttggatgtagctgaagtttcttcctcattaatggtatactgtcacagtaactaaagtattcatgtgatttgatattaaatacacctaggttatgttaatggttagaattaaacatttcttttgtctttaaacaattatttttggagaaaaaggaacaatctagaggaatcctaagtcttctgtataagtagggtacaatatacaatgaaactaaaacagctcttgtcttttagcccctgggaatcgtggcggatataataggaggggcaacatgccacagagaggtggtggcggtggaggaagtggtggaatcggctatccataccctcgtgcccttgtttttcctggccgtggtagttactcaaacagagggaactacaacagaggtggaatgcccaacagagggaactacaaccagaacttcagaggacgaggaaacaatcgtggctacaaaaatcaatctcagggctacaaccagtggcag

SEQ ID NO: 9012 - DNA, 468 bp, Homo sapiens; identical to SEQ ID NO: 4911

SEQ ID NO: 9013 - DNA, 594 bp, Homo sapiens
ccatctattacactacaaagtagtataatgcaaataaatagaattctatccaggttaaaggttaatagcattagattagcacagtaaggtatgactaagtaattagaacagattttaaaatattttactacattaagaggctggagatatatgtgtgtgtgtgtgtgtgtgtgtgtaattagagatcccatgtcatcagaagcatatatttgacacagccagcctacagtggaatgcagtctcatagaacaataaagctggtcagtctaagtaacatcatgtttgagcagtttaaaacaatgactttcagcgatgaaaccaaaaattcagattttccagtgattcaaagtacttatttcctgcatttaaaaataacttcataaaacttgaaattgatgaagcacaaaccagccttagtttaggtaggggtataacagataaaataacttttaagtgttcatgtgcagatgatttgcttgaccccaccctttgcattttgtgttgaacttagaggtgtcttgctttttttaatatgtcaaataataaagaattaggaaatctgatactttttttttgactcttgctctgtcaccc

SEQ ID NO: 9014 - DNA, 599 bp, Homo sapiens
ctgcaatttgtcctttaaggatgcctcacaaggatattatgtccaggtagctagtccatttatatcggggaccagttgtccttttgttgtttgtggctgtttattaaatgtagtggcacaactttgttgtgaatatgtaccatcatttgctacaatctagacagatcatcctgtctacaaaaaatcattttctacatttctaagaccattatcagtttatctgctcctgctagaaaaggacatactttttgtcaatttacattaacaaaggctctgctactccccatttactcgctgcaatgaaaactggtaagccaagggtaaagcttaagtatcagggactatgaatttagggtagaagtgaaaataaccaaagtggaactaaatcccctattctggagtgcaactgagatcaagtaaacttcgctggactttcttcttaactataaaactattaaccagaaggtaaagtcacacaattttacctcccaacaaacttttaaaataaaaatttccaaaaaatttagatgtctaggttttgttatatcttaccaagagttacacagacataaatttgtatttaacttcagttaaacatc

SEQ ID NO: 9015 - DNA, 562 bp, Homo sapiens
  unsure (450): n=A,T,C or G
cctgtttgattgtagctatgttggtgtatctcgtgtacaagatggaaaagtgcttttgttgttctacctgatccagttgggggagcaggaatagggggtgcctgcctaacggcctctagcccatgtgcttatactgggatctgtcccgagggatctgcacctggttggcagtcattttgtggtggacgtggtaaatcgcgagtgttaccatgatgacgaggcccaagatgagccccaaaatcaggggcaaggtttcttccagttgctcccgctcatccactgggcatttatgctcttcactgaagacaaaatctgagataatgtcaaaaggttggatgtggaccgcagacaggatcatggtgaccgtcttctgcggatcactagaggccagtgaaatggtttgttgagcttgacactcataggacttcccagcgggggtgaccaaggcanagaggtggtgcgagttggctgtgtgcttcccagcactgactgcgtctttgaagtgggttttctccgaggagtcgtagacaaactgcactttgctcagcctccaagtcgcctc

SEQ ID NO: 9016 - DNA, 598 bp, Homo sapiens
tttttttttttttttaaggacaactttttattgctaccagaggcttttatcatcagtacacagttctgactgcaatacctttttcagactgcaaagggaactcaggatccagaagtcattaaaagaaacataaggctggggaggcagggggagtaagttctattagaaaatcctaatagcttaacaaaactagggtactaaattcagttataacatgttacagacttaaatcatagagctgccccaacatctagacagtctctcctactgattataaatgagtgaaaactatcagttagaaaaatctaatttaagttgttaatacatgtttctttggtgagcacctggatatatttatcacaaattcttttatacaaatgtcgaaaatgctttcaacaaacctaagtgtcctaattacatgccacttttaagcatcactttaaggtaaacaaaaatgaaaaccataattttaaattaaaatttgaaatgagacacaaaatcaacctggtaatatgagaactttttcttttgccatctctgattaatatgggacaattccaaagtacccttttcagactaattggaacttgagtcatgg

SEQ ID NO: 9017 - DNA, 528 bp, Homo sapiens
agataaagggttttgaacatgaaatgacaaaaacaacagcaagaagaaaattcttgtcctttttcattactatcagactcaaataaatgtcttggctcttacattacattcattcttcaaccattgtggtctggcttccacttccttcacttcaccaacatggctctgccaaaggaagcccgtgatctctaggccatcactttaattgatctctctacaacatttatcctggttgttaagccctccttacaacattcttctctctttgtttttatagctccatctctcctgcttctttaacttgataatgcatacttgatttttctatttgttatttcataaaccaattaatacacagataaaatgactgtatatcaaaccatgtttgtatagaaaaatggattttggatgcctctcatatgtaattagttctattaaacatattaattgtattgtttaatttgtcaggtttttgacagaattttgtttacaagtaataaaaattttatctccaatttccaaaaaaaa

SEQ ID NO: 9018 - DNA, 469 bp, Homo sapiens
  unsure (8): n=A,T,C or G
ctgcgttncatgtaacaaaagatgcaaacaaaatagattcaagttgttttgcagacagcacaatgatacaatattaggactacagaatctcagagtaaaccacaatgatttaaaggtaagatacacagaaataaaatgattttaacagaaaaatatgacattcctgaccttaggtctgggcacatgatgtctgacccctatagaggcaccttggctaaaatggaaatgacctagtgccatggctgacctcacttgtgcgttgctgagcccatatgtgaacaaatccccttgatacagcaccatggtaggcatgagaggagaagtgttttaactattctcttatgaattgtaaccaacccttattatctactgatggatggacagggggtggggtgatcatacaggatggcagacattccaagtactcttcaccccagtgtggacggaacagaatctggctacacggtgg

SEQ ID NO: 9019 - DNA, 327 bp, Homo sapiens
  unsure (11): n=A,T,C or G
  unsure (33): n=A,T,C or G
  unsure (37): n=A,T,C or G
  unsure (38): n=A,T,C or G
  unsure (128): n=A,T,C or G
  unsure (139): n=A,T,C or G
  unsure (230): n=A,T,C or G
  unsure (270): n=A,T,C or G
  unsure (295): n=A,T,C or G
  unsure (296): n=A,T,C or G
  unsure (301): n=A,T,C or G
  unsure (305): n=A,T,C or G
gactacattcntcttattgctgcagtgaaaggngtgnntgaccatcgaatgaagtgctggcagaaatgggaagatgctcaaattactttgctcaaaaaacgtgaagctgaagcaaaaatgatggttgntaacaaaccanataaaatacagcaagctaaaaatgaaataagagagtgggaggcgaaagtgcaacaaggggaaagagattttgaacagatatctaaaacgantcgaaaagaagtgggaagatttgagaaagaacgagtgaangattttaaaaccgttatcatcaagnncttanaatnactagttcaaacacaacaacag

SEQ ID NO: 9020 - DNA, 138 bp, Homo sapiens
ctgcccaaaaggtgtcccatctcttgggtatcaatgtgaccgatttcaccagaggaatcctcaccccgcgcatcaaggtgggacgggattacgtccagaaggcgcagactaaagagcaggctgactttgccatcgagg

SEQ ID NO: 9021 - DNA, 556 bp, Homo sapiens
ccacctgtctgcaagagaggcggcccctgtgcttgcaacgcttacgtgttgatcccagtgtccttttccaaatgagtgctgtagctttagaagtggccctctatagaaagaagtcaaaagatgaggccccttctagaatctaggataacaagagtgttgacagtttgaggagtcgaattgagattcatcatcaaagagcaatgcagcgtcgttaaaataaaaactgtgccttttaaaaagaaaaatgcaaatatagagcaaatccctaaacttgaaccatttcctagtgccttgctagacaaacataaaggggcagggttgtggggaagggaacgtttttggtggtgtgtgcagttcctactggatgagtgtgtgtttcttaatgtctcatttcaagcaggagatgttgggtctggagcaagatctgagactgcgatgtcccccaagggtgacaggtcagatttatttcagtcagtgcaagtcacactccaaactaaaggctgggcagtgcgtttagtctgtggcctagaagacctcatcagcccccgagaggagg

SEQ ID NO: 9022 - DNA, 224 bp, Homo sapiens
ctgaacatctgtttttagcaccatgcctcccttcctccttcaacctcctgatatcactgtcgtctcctctgcaggtgctttggttttgcccttctggtactaagttactgtatcatatgctttctgtttcagattttatggtttaaggtaactgatgagatctacctctgacaaaaagagttggaatttttgtttctatttcctttgttttatgctaagatttt

SEQ ID NO: 9023 - DNA, 569 bp, Homo sapiens
ctgggagagctagactaagttggtcatgatgcagaagctactcaaatgcagtcggcttgtcctggctcttgccctcatcctggttctggaatcctcagttcaaggttatcctacgcagagagccaggtaccaatgggtgcgctgcaatccagacagtaattctgcaaactgccttgaagaaaaaggaccaatgttcgaactacttccaggtgaatccaacaagatcccccgtctgaggactgacctttttccaaagacgagaatccaggacttgaatcgtatcttcccactttctgaggactactctggatcaggcttcggctccggctccggctctggatcaggatctgggagtggcttcctaacggaaatggaacaggattaccaactagtagacgaaagtgatgctttccatgacaaccttaggtctcttgacaggaatctgccctcagacagccaggacttgggtcaacatggattagaagaggattttatgttataaaagaggattttcccaccttgacaccaggcaatgtagttagcatattttatgtaccatggttatatga

SEQ ID NO: 9024 - DNA, 356 bp, Homo sapiens
  unsure (328): n=A,T,C or G
ctgatgaaggcatctgatgccttcatctgttcagtcatctccaaaaacagtaaaaataaccactttttgttgggcaatatgaaatttttaaaggagtagaataccaaatgatagaaacagactgcctgaattgagaattttgattttttaaagtgtgtttctttctaaattgctgttccttaatttgattaatttaattcatgtattatgattaaatctgaggcagatgagcttacaagtattgaaataattactaattaatcacaaatgtgaagttatgcatgatgtaaaaaatacaaacattctaattaaaggctttgcaacacanaaaaaaaaaaaaaaaaaaaagggggggg

SEQ ID NO: 9025 - DNA, 564 bp, Homo sapiens
ctgggaagccacgagaatattgtgaacctgctgggggcgtgcacactgtcaggaccaatttacttgatttttgaatactgttgctatggtgatcttctcaactatctaagaagtaaaagagaaaaatttcacaggacttggacagagattttcaaggaacacaatttcagtttttaccccactttccaatcacatccaaattccagcatgcctggttcaagagaagttcagatacatccggactcggatcaaatctcagggcttcatgggaattcatttcactctgaagatgaaattgaatatgaaaaccaaaaaaggctggaagaagaggaggacttgaatgtgcttacatttgaagatcttctttgctttgcatatcaagttgccaaaggaatggaatttctggaatttaagtcgtgtgttcacagagacctggccgccaggaacgtgcttgtcacccacgggaaagtggtgaagatatgtgactttggattggctcgagatatcatgagtgattccaactatgttgtcaggggcaatgcccgtctgcctgtaaaatggatg

SEQ ID NO: 9026 - DNA, 592 bp, Homo sapiens
ccacagtcttatatttttaatttgaatttactatctcctaagctagttgttttcaactatggagttttataaaaaataaaatgcctaggccctactgctgaatctctttacttcatatatttggtatattatgtctcataattgttatatctcaatttatttttctatataaaaattgtgttcctccatttttataaatcagatttttttaatgcaaacttaattattatccttagagacaacttgcctatttttttattttattttttggaatggctttattatctttggcatgctacagaagcaaccacatttctttactggttgcattataattatgcacccctcatctgacctgtcacatttgagggttaccagttataaattaaaaacagccactctaagtctctgtcatctacagatttttttttttcactctgaggcttgtgtgaatgccctggtataagctacaggccagattttgtgtcttcagccaaggacagtttcaggcttgtgtgaaggccctgctataagctacaggccagattttgtgtcttcaaccaagaaagacagtctcagagcttcatggaga

SEQ ID NO: 9027 - DNA, 328 bp, Homo sapiens
ctgtagagtgggcttatcatctttcaacacgcaggacaggtacagattcttttccttgaggcccaaggccacaggtattttgtcattactttcttctccttgtacaaaggacatggagaacaccacttgttgctccatatcctgtccctggaggtggagagctttcagttcatatggaccagacatcaccaagcttttttgctgtgagtcccggagcgtgcagttcagtgatcgtacaggtgcatcgtgcacataagcctcgttatcccatgtgtcaaagaagataggttctgaaatgtggagcacatgttgtttaggtataaaatca

SEQ ID NO: 9028 - DNA, 598 bp, Homo sapiens
  unsure (577): n=A,T,C or G
aaaagtgtgacgagaacatcctgtggctggactacaagaacatctgcaaggtggtggaagtgggcagcaagatctacgtggatgatgggcttatttctctccaggtgaagcagaaaggtgccgacttcctggtgacggaggtggaaaatggtggctccttgggcagcaagaagggtgtgaaccttcctggggctgctgtggacttgcctgctgtgtcggagaaggacatccaggatctgaagtttggggtcgagcaggatgttgatatggtgtttgcgtcattcatccgcaaggcatctgatgtccatgaagttaggaaggtcctgggagagaagggaaagaacatcaagattatcagcaaaatcgagaatcatgagggggttcggaggtttgatgaaatcctggaggccagtgatgggatcatggtggctcgtggtgatctaggcattgagattcctgcagagaaggtcttccttgctcagaagatgatgattggacggtgcaaccgagctgggaagcctgtcatctgtgctactcagatgctggagagcatgatcaagaagccccgccccactcnggctgaaggcagtgatgtgga

SEQ ID NO: 9029 - DNA, 576 bp, Homo sapiens
ctgaaaatcttttagtaaaagctttaaagatgagcccatgaattcactttaaatttcaccagttaaattaggtcaaatggaaggaactcaaatgagtattgcccaatcagagcccattatttgtaagtcatcagtaaccttaaaactccacttagacctaattattgaaaacttgcatataatgaagtgaaagaatttccattcatcaacctctcaatcccaggttttcaaagaaaaacctatctaaggaatacttaccaaaatcagataagaaaatttaaacctgcatagttatcagatttgttccactacaaccagtctgcatacagttacacatcaattcgttctgtatacactctagaactgaacagaacaaagtttagcatagaaaagctgtaagaaacaggttcctaattacggaagttgcaaagttcaaaagggtatgaaaaaaactaatgtaaattcgatacttccttcgtttcaaagaaatagactttctgtaaaaatatatacaatttttacaaatacatttacaagctgtcttaagaattgaggatatccatattcataactaat

SEQ ID NO: 9030 - DNA, 597 bp, Homo sapiens
ctgtggctgtctgtcagagaagcacatttttctgcagataattagaatggcttcccccatctctcacggactgtcccaagtctagaaaagaattgagttcctcttctattagtcaaataaaagggaagagaatgtttgtcttcctttcctttctgtagtgttaagaaaataaacgaacttaatgattctaaattatcagtgagcttaacactgtactatagaccaaagattaccttttcaaaaagtcctttgaggtgaaatattttgtatacgtaatacatagatgcacatataaacacacacatatagaatctcaatattttaacacttctttgggtagttgtactaactcactaaccctgaggaaaaagttaagaaattgaaagtgttttcttcaaaagttgagatttaacaataaaaggtgttactttgataactaaaaggaactttattatcctcttcctaaaataaaccaatgcctattctgaaaatggcacttgcaattacaatttgccattatcaaagctaccactgaggtagaggcattatctaaaacaaataccacttatcatttattggcagttacctcgagaggga

SEQ ID NO: 9031 - DNA, 581 bp, Homo sapiens
ctgggaagccacgagaatattgtgaacctgctgggggcgtgcacactgtcaggaccaatttacttgatttttgaatactgttgctatggtgatcttctcaactatctaagaagtaaaagagaaaaatttcacaggacttggacagagattttcaaggaacacaatttcagtttttaccccactttccaatcacatccaaattccagcatgcctggttcaagagaagttcagatacacccggactcggatcaaatctcagggcttcatgggaattcatttcactctgaagatgaaattgaatatgaaaaccaaaaaaggctggaagaagaggaggacttgaatgtgcttacatttgaagatcttctttgctttgcatatcaagttgccaaaggaatggaatttctggaatttaagtcggcccgtctgcctgtaaaatggatggcccccgaaagcctgtttgaaggcatctacaccattaagagtgatgtctggtcatatggaatattactgtgggaaatcttctcacttggtgtgaatccttaccctggcattccggttgacgctaacttctacaaactgat

SEQ ID NO: 9032 - DNA, 587 bp, Homo sapiens
ccagttttcatacagtctcggggttttaaaactttgaaatcaaggacacgacgtctccagtctacctccgagagattagctgaaacacagaatatagcgccatcattcgtgaaggggtttcttttgcgggacagaggatcagatgttgagagtttggacaaactcatgaaaaccaaaaatatacctgaagctcaccaagatgcatttaaaactggttttgcggaaggttttctgaaagctcaagcactcacacaaaaaaccaatgattccctaaggcgaacccgtctgattctcttcgttctgctgctattcggcatttatggacttctaaaaaacccatttttatctgtccgcttccggacaacaacagggcttgattctgcagtagatcctgtccagatgaaaaatgtcacctttgaacatgttaaaggggtggaggaagctaaacaagaattacaggaagttgttgaattcttgaaaaatccacaaaaatttactattcttggaggtaaacttccaaaaggaattcttttagttggacccccagggactggaaagacacttcttgcccgagctgtggcgggaga

SEQ ID NO: 9033 - DNA, 574 bp, Homo sapiens
cctcaatgacaagatgtttgagcatgacttccgttggactgatggcagcacactggtaagatgcccttgaaaatgatgtcaagttctaccttctggaaatttggtactgtgcactgattgtgcattacagagggtgcattagactggaggcaagttaaatgacttgctcaaggtcactcagtgaaacagagaagggttagaagagttccaagctacctgatccaacatccagtcctctcttcaatagttgtggttctcttcaaaagaggagtgtaccagatttctatcaaaccagaaaaccagacaattagtagaattgccttgggtctgtctttcagatggttatctttgctttttctagcttcagagcaaaaagagaagaataaaatgtagcagaaaaagtcattttaaaaaaatacctttccgtcttaaataattcactggaaatccgctataaggcatgactcatttccaagcaaaaatatccatttatttttatcttaaagaagactgttgatatgatcttgtgaatttctgccaactaattacatatttcaacttgttttctattttt

SEQ ID NO: 9034 - DNA, 449 bp, Homo sapiens; identical to SEQ ID NO: 8473

SEQ ID NO: 9035 - DNA, 109 bp, Homo sapiens
  unsure (95): n=A,T,C or G
  unsure (99): n=A,T,C or G
ccagtggaatgatgttccctgcaattaccatctcacctatacgtgcaagaaaggaacagttgcttgcggccagccccctgttgtagaaaatgccnaganctttggaaag

SEQ ID NO: 9036 - DNA, 538 bp, Homo sapiens
ctggcaatgacaagactgggagtatcaaactaggattgttagttcaattaaaatttcagataaacaataatgtacttatactaaaaaattatttgttgtttatctgaaatgaaaatttaactgggtacccaattgtttgtttgtttaatctaaaaaccctgattgaaatttatctaataaaacatcatttaatatctaaaataaaataaatttactataacatctttataactattcaatcaatgattcatcttctatttttccaaattcttgcacaaatatttgatgcttaaataaatacataaataataaataggttaataagttacacttgaaaataatttatgttatgatgaaaaaacttaaagtgcttccacatgtcctcacaacatcactgtgaggtaagatggtggctaatactttttccacttagaaataaaggagaaaccaaggcacagtggaacaaggacttgtggatcctggctagcagagtagggttgccagatttaacagaaaaaaatccaggatttccagctaa

SEQ ID NO: 9037 - DNA, 521 bp, Homo sapiens
ccatcggtgctgaaattgagcattttaaatagtacagtaggctggtatacattaggaaatggactgcactggaggcaaatagaaaactaaagaaattagataggctggaaatgcttactttctgctctcattttctttcattttgtctgctgtctttttgaatgccaatactttcatttaaaatgttttgggagcacggcaacccaaaatgactgaacggtggtccaaaaatccaaaccaactgataattacttctcgaggtgataggaaaggcacaggaagttaggactttggctgaaatgatgaaaacacatgttcgccattttagggatcagcgcctcgactcctgccacctccggctccaacgatgatcatgtttggatgtatttattgaattgtcctttgctgatgaggaatttttaaagtatttcatagaataagtcctttggtatgcagatgctacatggaaggaaagaaagaaaaaaagaaaacacacaatattacttgctccatgccctaaa

SEQ ID NO: 9038 - DNA, 525 bp, Homo sapiens
ccaaataactcccaaatgaaacactcaacccaaggatgttttcagcccactgttagtgaagctgggtgcagaatgcaaagcctctaaaaggagaggatacaaagtcaggtgagtaggggccattggcaatgctcagagccagccagactccaaacagggagcccaagtggtttttttctgggacactctacttgaattattgtttaattagtcaaccatagatcttcaaaagagaacaattagttaacatgataaaaagtgactgcattctttggactgtatcataattatagtaagcaaattctgacagttttaatgaaaatagcctccaccattttgcaggtatgaagataacttaattatccacagggcttttaatgtctgctggacaatacatgaatgataagctataaatgacattgttttatgatataaaaatactagtttttttcatttattatttctataggcattcactgtttgagtcaaggttaggcttgttaagtgattaaaggcaattttatt

SEQ ID NO: 9039 - DNA, 371 bp, Homo sapiens
cctcgagtgcgatatggcaaagccaaagctcccatccaagacatctggtaccacgaggatcggattagagcgtgagtgctcagccctgtagtggacaggaggcaacagaacttcagaagggaaggtttcggtagcagtctgggaattcaaacatgaaattgagtcaggggtttgccctgtggagaaggcttatctagccaaattagggaggcagcaccccttcctcatagtgaaactgaagttctgaaaagtggaatctggagcccagcaaccgaaagatcattgcaattatagccgcatgtttctgggcatctgctttgggccaggcactgtactaagctctttgcaagcattatctcattctctaaagg

SEQ ID NO: 9040 - DNA, 590 bp, Homo sapiens
  unsure (505): n=A,T,C or G
  unsure (547): n=A,T,C or G
gccacactctacttctgcttctgccacctatggggtcgaggcaggtgtggtgccttggctaagtccacagacttctgagaggcccacgctttcttcttctccagaaataaaccctgaaactcaagcagctttaatcagagggcaggattccacgatagcagcatcagaacagcaagtggcagcgagaattcttgattccaatgatcaggcaacagtaaaccctgtggaatttaatactgaggttgcaacaccaccattttcccttctggagacttctaatgaaacagatttcctgattggcattaatgaagagtcagtggaaggcacggcaatctatttaccaggacctgatcgctgcaaaatgaacccgtgccttaacggaggcacctgttatcctactgaaacttcctacgtatgcacctgtgtgccaggatacagcggagaccagtgtgaacttgattttgatgaatgtcactctaatccctgtcgtaatggagccacttgngttgatggttttaacacattcaggtgcctctgccttccaagntatgttggtgcactttgtgagcaagataccgagacatgtgact

SEQ ID NO: 9041 - DNA, 334 bp, Homo sapiens
ccagcatcctcttggatctgcagttaggctcaacacattccagccttagcacaatcttctttgtggtcttagccttcttccggaaaattggctttgtctgcccaccatagccactctgcttccgatcatagcgcctccttccctgggcatacaaagaatccttgcccttcttatactgtgtcactttgtgaggctgatgcttgccacacttcttacagaaggttcttcgggttttaggtacgttgaccatctttgcagcagggctgttttgtctatatgatgaaaacgagaaacagcgcccgacacctggcccttcgcagctctcgcctttcgc

SEQ ID NO: 9042 - DNA, 597 bp, Homo sapiens
  unsure (127): n=A,T,C or G
  unsure (134): n=A,T,C or G
  unsure (146): n=A,T,C or G
  unsure (456): n=A,T,C or G
  unsure (537): n=A,T,C or G
  unsure (557): n=A,T,C or G
ccatcggtgctgaaattgagcattttaaatagtacagtaggctggtatacattaggaaatggactgcactggaggcaaatagaaaactaaagaaattagataggctggaaatgcttactttctgctntcatttnctttcattttgnctgctgtctttttgaatgccaatactttcatttaaaatgttttgggagcacggcaacccaaaatgactgaacggtggtccaaaaatccaaaccaactgataattacttctcgaggtgataggaaaggcacaggaagttaggactttggctgaaatgatgaaaacacatgttcgccattttagggatcagcgcctcgactcctgccacctccggctccaacgatgatcatgtttggatgtatttattgaattgtcctttgctgatgaggaatttttaaagtatttcatagaataagtcctttggtatgcanatgctacatggaaggaaagaaagaaaaaaagaaaacacacaatattacttgctccataccctaaactgccgataccacagncgtaaaatgaaggtgtctantagttgttatagcacggtagtccattctttctaaggacca

SEQ ID NO: 9043 - DNA, 337 bp, Homo sapiens
  unsure (116): n=A,T,C or G
  unsure (120): n=A,T,C or G
aaaagattgatcgccgttctggtaaaaagctggaagatggccctaaattcttgaagtctggtgatgctgccattgttgatatggttcctggcaagcccatgtgtgttgagagcttntcanactatccacctttgggtcgctttgctgttcgtgatatgagacagacagttgcggtgggtgtcatcaaagcagtggacaagaaggctgctggagctggcaaggtcaccaagtctgcccagaaagctcagaaggctaaatgaatattatccctaatacctgccaccccactcttaatcagtggtggaagaacggtctcagaactgtttgtttcaattgg

SEQ ID NO: 9044 - DNA, 265 bp, Homo sapiens
  unsure (94): n=A,T,C or G
ccttcaaagaattcccatccagtccaagtggggaggatcatactagaagactaccatgatcatggtttactgcgcgtccgaatggtcaaccttnaagtggaagattctggactgtatcagtgtgtgatctaccagcctcccaaggagcctcacatgctgttcgatcgcatccgcttggtggtgaccaagggtttttcagggacccctggctccaatgagaattctacccagaaggtgtataagattcctcctaccaccactaagg

SEQ ID NO: 9045 - DNA, 300 bp, Homo sapiens
ctgccacatccctgggcttacggtgcagcaggtgcttttttcaagacaggaatcaaaatgttaggaacacggcagaaaggggacacctggagaccaaacgcaggatgaggagttctgcagaggtcacagggaagtcacagaacagtaatacgctagcaggggcatggggcgtgaagaacagaagaagagaggaagcgtttccaagcctccagagaagaaatcaaggccaaccaaagcttcccgggtcacagaaccaattcttttaccaggcagtaccactgctgtcatttcagcttctgg

SEQ ID NO: 9046 - DNA, 518 bp, Homo sapiens
  unsure (90): n=A,T,C or G
  unsure (104): n=A,T,C or G
  unsure (402): n=A,T,C or G
  unsure (462): n=A,T,C or G
ccatcttaagttaaaggccctttatcataaaatatatggttttaaattttactcaaattgaatttataatccctatgacttccctacatntacataacaaaagngtgtagtaaaattagcaaatactaaactatattgataatttatcattcttagtttgtggtttttagaaacagtacacgcacctaatatatgtcgattccttggcttattagttgcagtgtacaatgcaacaaaatacaaaatacatgcttggtgaacattcgttcatatctacaagacggcagctagagattaggtttcaatactgaccatttactatcctacaagcaattagcattacatcataatatgccatcaaggcaactttttttatactgaaaaaatcaaaataaaaaccgntatttgtaaacttttatacgaaatgtaactcttcaagtggaaataaaaaataaaatttgnctatttactattgaatacacataggatttcaattttcattataccgagaaaaaagc

SEQ ID NO: 9047 - DNA, 207 bp, Homo sapiens
ctgtattactactgtttctatatttatgattaattactagcagtacaactcccagaaggaaggagatggatccaacagcgatgtaagcaatccccaaaaatggattttttcctcccatccatgaaatagtgctcaagatcatccgttttcgtccatcaaaataatgtacagggtaattgtatgtgacattcaaagagtatcggccag

SEQ ID NO: 9048 - DNA, 597 bp, Homo sapiens
  unsure (568): n=A,T,C or G
ccttcattagaataaagtatatcttaactacattttgcaaagaaatgaagcaatggttgcacaaccagtcagggccaagttagtaacatacaactcagccatcagcccacctctccttcaaactaaactaatctaaatgtatttttcagaaaatttcctccatactccatgtatgtgttacatacatccaatcatatccatattttggatcatttttttctatattcatcagattattggttaaaatgcacagcaagtagaaatgatccatttcaaaattcttaatatctagcgttctctgtaaaacaaaagctgacaacagttttattgtactcctattaaatgtaggtgcatgttcattaggacatctgagctatttttaggaccttcagaaactggtgtgattcactttggccctctgagatagaaatgccatcttagtatttactgtgactacatacctcttttgttaaaacttgaccctgagttttgagtgctggaatataaactgtaaaatggaaaacactccaaaatacattagctaatattggtgtctctacaatactgngctttttctctccattaacataatgcacc

SEQ ID NO: 9049 - DNA, 596 bp, Homo sapiens
  unsure (16): n=A,T,C or G
  unsure (590): n=A,T,C or G
ctgcacatggattggntaacataatatatactgctatataatcttttaagggctaatatttgtagataatttaaaagcatgtcaatttcctctaagatttgattatttaacctgcacaaaggccaatcttcagttatcaatgacaagaaaactctagggctgccaaaataacttcattttagaccccagagttagtgttaggctggtaatgtttctaatttgggaataatgagactagaaagctaggagggccccctccaaatttctcccttgtattaggctgaagtagaacataacgtggcttaaagcataaacttaaagcatatgctttgagttttaaaaatgttaacctgtaattaattattagagtattatccatagtctactatgatagtcagttaatattctctaaatcagattatattcatttgaaaatgcatctgcatatttgcaaatgtgttattacacaagatcttacctatgtcaatttaaagaggttaaagatgcaggaagcccccactaaaatgtaaacacatttgtacggttttcagaatgtttggactcattctttcccattgacagagcagtangtttta

SEQ ID NO: 9050 - DNA, 506 bp, Homo sapiens
tttttatgcagtgcattcattgtaaactataaataacatttgtattaaaaagaaagctgggtaatacaaaaataggagagactctgaggagcaggcaatctgttgaggctcagtatatcttatttgctttgtagtctgctgtcattcctttcaaagagcacacagcacatgaggcatagtaatcatctgtcttgttaacctctctaatttagaaatctgttgttcgtaaaactggaccaattatcacaaactatcatttgcataattaaccgcaagtctgttacaaagcattttgttagtggtatcaacaaatgcaggaggatggacatttataaaaaatgggttttgttaagcttgccaactccttagatatcatggactatactgccatttcacgatttaattagatatttaatgcctcaagtaaaagactgatcaatggaagcaagcaaaactaaattattttctaggtgctgtaatatttcatttgataaggtaacaaaagg

SEQ ID NO: 9051 - DNA, 390 bp, Homo sapiens
ctgtgcccaggaaatggctaaattcatttcaaaaaacaaacacgtgagcctgtgcatcttcactgcccgcatctatgatgatcaaggaagatgtcaggaggggctgcgcaccctggccgaggctggggccaaaatttcaataatgacatacagtgaatttaagcactgctgggacacctttgtggaccaccagggatgtcccttccagccctgggatggactagatgagcacagccaagacctgagtgggaggctgcgggccattctccagaatcaggaaaactgaaggatgggcctcagtctctaaggaaggcagagacctgggttgagcctcagaataaaagatcttcttccaagaaatgcaaacaggctgttcaccaccatctccag

SEQ ID NO: 9052 - DNA, 225 bp, Homo sapiens
  unsure (49): n=A,T,C or G
  unsure (125): n=A,T,C or G
  unsure (155): n=A,T,C or G
  unsure (174): n=A,T,C or G
  unsure (190): n=A,T,C or G
  unsure (200): n=A,T,C or G
  unsure (203): n=A,T,C or G
  unsure (210): n=A,T,C or G
aaaatttcatcactaaaatgatctacaggtctatggaaaaatgtgtaancacataaaatacacaaacctatttttttaaaaatgagatacttaaaatttctttagcataccaacaaaaaatgaangtagcattgccattttactacagatgtgcngacattccaaagtccaccnattgttcgtatatatnggctcaacangtnatatttnagaatatactgctgg

SEQ ID NO: 9053 - DNA, 134 bp, Homo sapiens
  unsure (1): n=A,T,C or G
  unsure (3): n=A,T,C or G
  unsure (21): n=A,T,C or G
  unsure (118): n=A,T,C or G
  unsure (120): n=A,T,C or G
ngnccatggaaacatagtatnaatcatttgtgtatctaaatataaagacatataaataagtaaggaagtatagtcccgtggaaccaccatctgttactggcagaaactttgttatgcngnaaataactggattt

SEQ ID NO: 9054 - DNA, 256 bp, Homo sapiens
  unsure (150): n=A,T,C or G
  unsure (157): n=A,T,C or G
  unsure (166): n=A,T,C or G
  unsure (175): n=A,T,C or G
  unsure (197): n=A,T,C or G
  unsure (251): n=A,T,C or G
  unsure (256): n=A,T,C or G
ccaaggacttgacaaagacctgtgaatttatcgttcactccgctcctcagaaggggaagtttactcccagtcccgtggacttcacgattacacctgaaaccttacagaacgtcaaagagagagctttgcttcccaaatttctccttcgangacatcncaacttaancaaactgtntcatcacggcagccactaacgnggagagctggtggtggagagctcggaagccgccatcagaagcgtggagctgcanacctn

SEQ ID NO: 9055 - DNA, 269 bp, Homo sapiens
  unsure (137): n=A,T,C or G
  unsure (160): n=A,T,C or G
  unsure (176): n=A,T,C or G
aaatatgacctctgttccctgaagaaaaatcatatcaaagactctggctacgaatcccagcgggaactgtgaggcaaacatggtgaggaaccagggggcagcgtagaggctggggccgatctcgtgctcctccaggngattgtagaggtctctgtggtantcatgaagcaacctcnagagcttggtacatctggatcttgtaaaataatcatgtctggccgatactgtttccgcagccccatgtcaaacatcagaaacttgagcatttt

SEQ ID NO: 9056 - DNA, 363 bp, Homo sapiens
  unsure (18): n=A,T,C or G
  unsure (19): n=A,T,C or G
  unsure (159): n=A,T,C or G
  unsure (164): n=A,T,C or G
  unsure (168): n=A,T,C or G
  unsure (205): n=A,T,C or G
  unsure (345): n=A,T,C or G
  unsure (348): n=A,T,C or G
aaatatgctgcatagacnnctggaccatattttgtagccattaaattttcaaaagactgggtccactgtaatacttcctccaaagtaaggtttgaagggggcctcttagattcatctctgcacatcttacaaatccaacaattccgcctgctcattttncaaancttnaaataaacaatgatcatttttttctcatgttggtggnataatatgtggaaacattccattgacaaatatatcctgtcgagcagtccaccatgctaaatttgatctcctctttgttatgatccgtttgaaatcaggttctgaaattttgtgagacacccagcattttatttttcccanagnaaaagaattttactg

SEQ ID NO: 9057 - DNA, 196 bp, Homo sapiens
  unsure (2): n=A,T,C or G
  unsure (12): n=A,T,C or G
  unsure (104): n=A,T,C or G
  unsure (113): n=A,T,C or G
  unsure (167): n=A,T,C or G
  unsure (176): n=A,T,C or G
  unsure (182): n=A,T,C or G
  unsure (184): n=A,T,C or G
  unsure (186): n=A,T,C or G
cntggccgaggnaaatatcacaagtaggtgggtaagtgtcatctggcatcttctttctgtagccaggtaactcttagatcttattcatcagcctgctgaacagntcctttttnagagacatagataccatccaaaaatttcctgatatccttgcttttaactgttgnggctcgctnaaatcnanancccttgaatg

SEQ ID NO: 9058 - DNA, 102 bp, Homo sapiens
  unsure (18): n=A,T,C or G
  unsure (19): n=A,T,C or G
  unsure (20): n=A,T,C or G
aaaaaaggttctgaaatnnncatacaagcatgctggacaatcccacccttttcccctccccatttcccctttttttgttcaaaccatggtaagagttctgat

SEQ ID NO: 9059 - DNA, 593 bp, Homo sapiens
  unsure (25): n=A,T,C or G
  unsure (425): n=A,T,C or G
  unsure (475): n=A,T,C or G
  unsure (523): n=A,T,C or G
  unsure (558): n=A,T,C or G
  unsure (567): n=A,T,C or G
ttggcgtaatcatggtcatagctgnttcctgtgtgaaattgttatccgctcacaattccacacaacatacgagccggaagcataaagtgtaaagcctggggtgcctaatgagtgagctaactcacattaattgcgttgcgctcactgcccgctttccagtcgggaaacctgtcgtgccagctgcattaatgaatcggccaacgcgcggggagaggcggtttgcgtattgggcgctcttccgcttcctcgctcactgactcgctgcgctcggtcgttcggctgcggcgagcggtatcagctcactcaaaggcggtaatacggttatccacagaatcaggggataacgcaggaaagaacatgtgagcaaaaggccagcaaaaggccaggaaccgtaaaaaggccgcgttgctggcgtttttccatangctccgcccccctgacgagcatcacaaaaatcgacgctcaagtcagaggnggcgaaacccgacaggactataaagataccagcgtttccccctggaanctccctcgtgcgctctcctgttccgaccttgccgnttaccgganaccttgtccgctttctcctttgggaa

SEQ ID NO: 9060 - DNA, 249 bp, Homo sapiens
  unsure (17): n=A,T,C or G
aaattgacctcctcagntaactcagcagaacccagcatgtcagcagtaaattggtcaatatgagcaactggcttggttccaattgtcttacaaatgaattcaatgtcttctctttcaatatccttaatcaccatgatcttcattttattcagaaagtgtaatgcaagatcactaagagcatctcttagaatagatttctgtatgagaaggacattacatcctgtttttttaatttgcttcactaaattt

SEQ ID NO: 9061 - DNA, 373 bp, Homo sapiens; identical to SEQ ID NO: 4043

SEQ ID NO: 9062 - DNA, 209 bp, Homo sapiens
  unsure (21): n=A,T,C or G
  unsure (44): n=A,T,C or G
  unsure (54): n=A,T,C or G
  unsure (98): n=A,T,C or G
  unsure (160): n=A,T,C or G
  unsure (162): n=A,T,C or G
  unsure (175): n=A,T,C or G
  unsure (193): n=A,T,C or G
  unsure (197): n=A,T,C or G
ttttttttgactcaaaaagtnacatttattcaaagaaaaaaaangacaagatgnccatcccttggctcccttccctcccccctcctgctgctcctcancccccagagattgagccctggctggggctgggtggcaggacagcccctcacatgaggtcagnancattgagggggcntttcctcaatggaggtgnttgnataaggtctcaa

SEQ ID NO: 9063 - DNA, 117 bp, Homo sapiens
cctactgctgagttcttatttatttaattgcttattgtcagtctcttccccacagaatggaagttccatcaaagtagagattttgttctctcttgttcaggatctgagtctccaagg

SEQ ID NO: 9064 - DNA, 434 bp, Homo sapiens
  unsure (68): n=A,T,C or G
  unsure (139): n=A,T,C or G
  unsure (157): n=A,T,C or G
  unsure (168): n=A,T,C or G
  unsure (192): n=A,T,C or G
  unsure (241): n=A,T,C or G
  unsure (317): n=A,T,C or G
  unsure (356): n=A,T,C or G
  unsure (375): n=A,T,C or G
  unsure (383): n=A,T,C or G
aaacataaaagatattcagagttttgggtcaactgcatctttctggagagtttagtttcttgttaagncaatttgtgtattttcattgagcatacatccttaacaaggtttcatacatgctggcactttgagggacagncaagggacattctgaaanaactcccaatngactggggatcaggagattgaatntcaaattatattttcgcccattaatctgactctgtaaacttgaaaaagncatttcctttctctgggctatgtggaagttcctttttttataaatgacaaatagccttatcatggaatcatagaanattaactttagaggtggtttagagcccatcctcattttncaggcccaaagaaatgaantgagtttngtcagtcaatacgatagctcctcctggggaaaaaaaaacaaaaaagaagtg

SEQ ID NO: 9065 - DNA, 354 bp, Homo sapiens
  unsure (154): n=A,T,C or G
ccaccctcactgtgcaccccgtggatgttctgcgcacccgctttgcagctcagggtgagcccaaggtacggagatacaagggcctcatggactgtgccaagcaggtgctgcaaaaggaaggcgccctgggcttcttcaagggcctgtcccccanttgctgaaggctgccctctccacaggcttcatgttcttctcgtatgaattcttctgtaatgtcttccactgcatgaacaggacagccagccagcgctgagcgcaggaaggaccccaggtcttccctggaggcagcctcctgaaggaaggaagattcagtctccactgagaggtgccgtctggcccttccctgcaggccag

SEQ ID NO: 9066 - DNA, 136 bp, Homo sapiens
  unsure (12): n=A,T,C or G
  unsure (17): n=A,T,C or G
  unsure (40): n=A,T,C or G
  unsure (53): n=A,T,C or G
  unsure (55): n=A,T,C or G
  unsure (56): n=A,T,C or G
  unsure (69): n=A,T,C or G
  unsure (81): n=A,T,C or G
  unsure (83): n=A,T,C or G
  unsure (98): n=A,T,C or G
  unsure (109): n=A,T,C or G
  unsure (118): n=A,T,C or G
  unsure (119): n=A,T,C or G
tggacctgaccnccgtntgatggacctgaccgctgatganggacctgatcgcngnntgatggacctgancgactgtatgangngacctgacccccgtntgagggacctnacccgttgnntgatggacctgaccgcc

SEQ ID NO: 9067 - DNA, 472 bp, Homo sapiens
  unsure (135): n=A,T,C or G
  unsure (144): n=A,T,C or G
  unsure (152): n=A,T,C or G
  unsure (171): n=A,T,C or G
  unsure (242): n=A,T,C or G
  unsure (279): n=A,T,C or G
  unsure (302): n=A,T,C or G
  unsure (329): n=A,T,C or G
  unsure (335): n=A,T,C or G
  unsure (405): n=A,T,C or G
  unsure (418): n=A,T,C or G
  unsure (469): n=A,T,C or G
aaaaggtaactttttaccaattttttgatcttcattagctggagtcaatgagtccaaggctggaatacatcgaaggagggcacaaccccctcccaaaacaatgccttcttcaacagcagctcttgtagcattaanggcatctgnaactctgnctttcttttcattcacttncaacatcacttgtcccaccaaccttcagcacagccactccatctgaaagttttgcaagccgttcattcagnttttccttttcatattcactagttgtgacatctaacngctcaatgatttcttgaatacgnttttcaatttgagccttgtcacctttncctttnaagagcatggcatcgtctttggtcacaatgacctctccaacttttcctaagtcatgaggctgaacgtctncaagattcagggncaatccctcttctccaaacactgcaccaccagtagcaatagccatatcttntaa

SEQ ID NO: 9068 - DNA, 112 bp, Homo sapiens
  unsure (49): n=A,T,C or G
  unsure (53): n=A,T,C or G
  unsure (54): n=A,T,C or G
  unsure (86): n=A,T,C or G
  unsure (105): n=A,T,C or G
ccgaggtaaaaaagagcaacagtggggaagcggctcccctcccccaagncatnntggctggcacactgtctgagcatcaccctggntttcaaagcgcgtcagctncaagacg

SEQ ID NO: 9069 - DNA, 306 bp, Homo sapiens
  unsure (9): n=A,T,C or G
  unsure (115): n=A,T,C or G
  unsure (173): n=A,T,C or G
  unsure (191): n=A,T,C or G
  unsure (195): n=A,T,C or G
  unsure (246): n=A,T,C or G
  unsure (273): n=A,T,C or G
  unsure (285): n=A,T,C or G
  unsure (299): n=A,T,C or G
tgatcctgnggatgggaaattttttgatcatgcggcacatcttgggggagctctttttggaatatggtatgttacttacggtcatgaactgatttggaagaacagggagccgctngtgaaaatctggcatgaaataaggactaatggccccaaaaaaggagggggttctaagnaaaactgggattggacantagnggtgcatctggtccttgccgcctgagagccccaggagacatcggctagagngaccatggctatgctcccgtctggaangatgccagcatntggcctcccactgnttttcag

SEQ ID NO: 9070 - DNA, 231 bp, Homo sapiens
  unsure (24): n=A,T,C or G
  unsure (50): n=A,T,C or G
  unsure (84): n=A,T,C or G
  unsure (111): n=A,T,C or G
  unsure (131): n=A,T,C or G
  unsure (135): n=A,T,C or G
  unsure (144): n=A,T,C or G
  unsure (163): n=A,T,C or G
  unsure (222): n=A,T,C or G
  unsure (225): n=A,T,C or G
ctgccaaccctgtctacggcaggnatgaccagtataagactccaatgganaacattgggctacaggactcactgctgtcacganttgacttgctcttcatcatgctggatnagatggatcctgagcaggancggnagatctcanaccatgtccttcggatgcnccgctacagagcacctggggagcaggatggcgatgctatgcccttgggtagtgctgtgnatntcctgg

SEQ ID NO: 9071 - DNA, 299 bp, Homo sapiens
  unsure (1): n=A,T,C or G
  unsure (3): n=A,T,C or G
  unsure (4): n=A,T,C or G
  unsure (11): n=A,T,C or G
  unsure (31): n=A,T,C or G
  unsure (32): n=A,T,C or G
  unsure (39): n=A,T,C or G
  unsure (58): n=A,T,C or G
  unsure (121): n=A,T,C or G
  unsure (149): n=A,T,C or G
  unsure (180): n=A,T,C or G
  unsure (181): n=A,T,C or G
  unsure (193): n=A,T,C or G
  unsure (204): n=A,T,C or G
  unsure (223): n=A,T,C or G
  unsure (224): n=A,T,C or G
  unsure (235): n=A,T,C or G
  unsure (242): n=A,T,C or G
  unsure (269): n=A,T,C or G
  unsure (275): n=A,T,C or G
  unsure (294): n=A,T,C or G
  unsure (296): n=A,T,C or G
ncnnggccgangtcctcaatcacaactttgnnagcagcngaaccggagggagccgcantgtacgccacaccactccttttagctctgtctacgttatctgggaaagggaagaaagcatcanagctgatagaaacttcagacaggttctnaacccattccttcttctctgcctcagtgagnnactgagggactncctcaaacagngccttccactttatcaaannttgatcctcgncaatggntccagtcacatattgatcgatggcatnggaganttctgctctcttcactccngnttt

SEQ ID NO: 9072 - DNA, 287 bp, Homo sapiens
  unsure (10): n=A,T,C or G
  unsure (31): n=A,T,C or G
  unsure (51): n=A,T,C or G
  unsure (71): n=A,T,C or G
  unsure (75): n=A,T,C or G
  unsure (104): n=A,T,C or G
  unsure (144): n=A,T,C or G
  unsure (163): n=A,T,C or G
  unsure (186): n=A,T,C or G
  unsure (187): n=A,T,C or G
  unsure (208): n=A,T,C or G
  unsure (232): n=A,T,C or G
  unsure (249): n=A,T,C or G
  unsure (268): n=A,T,C or G
gcttactggntcccgaaaatagacaccttcntgagtcagacccctatgggnaccggcctttctcaaatatnagtnagcaccctcaatcccactgctaaacgacnttttggtcctcgctctgccactatgactccaagtattttntcccactggaacaacacantgtttgtaggagccactgattcnncgtgccatggcgcaatgatgntggaacttgctcgtgcttagacangaaactcctttccttanagactgtttcagactccangccagatttgcactccagc

SEQ ID NO: 9073 - DNA, 402 bp, Homo sapiens
  unsure (106): n=A,T,C or G
  unsure (149): n=A,T,C or G
  unsure (169): n=A,T,C or G
  unsure (170): n=A,T,C or G
  unsure (298): n=A,T,C or G
  unsure (346): n=A,T,C or G
  unsure (392): n=A,T,C or G
ccaccacacccaattccttgctggtatcatggcagccgccacgtgccaggattaccggctacatcatcaagtatgagaagcctgggtctcctcccagagaagtggnccctcggccccgccctggtgtcacagaggctactattactggnctggaaccgggaaccgaatnnacaatttatgtcatttgccctgaagaataatcagaagagcgagccccttgattggaaggaaaaagacagacgagcttccccaactggtaacccttccacaccccaatttttcatggaccacagatctnggatgttccttccacagttcaaaagacccctttcgtcacccaccctgngtatgacacttggaaatggtattcagcttccttggcactttttggncagcatccca

SEQ ID NO: 9074 - DNA, 554 bp, Homo sapiens
  unsure (126): n=A,T,C or G
  unsure (216): n=A,T,C or G
  unsure (231): n=A,T,C or G
  unsure (297): n=A,T,C or G
  unsure (339): n=A,T,C or G
  unsure (342): n=A,T,C or G
  unsure (393): n=A,T,C or G
  unsure (401): n=A,T,C or G
  unsure (419): n=A,T,C or G
  unsure (434): n=A,T,C or G
  unsure (462): n=A,T,C or G
  unsure (496): n=A,T,C or G
  unsure (520): n=A,T,C or G
  unsure (521): n=A,T,C or G
  unsure (549): n=A,T,C or G
ccaaacccccgtctctacaaaaaaatacaaaaatcagctaggcgtggtggtgcgcgcctgtactcccagctacttaggaggctgaggtgggagagtcactggagcctgggaggtcgaggctgcagngcaagattgagaattgcaggattgcactgcaatccagcctgtgctacagagtgagatcctgtctcgaaaaaaaaaataaaaaaataaaangggcctatcaatgcnacgttcctgcaaggcattgataatataaatgcaaaagccaccgcaaccaaaaaggctataatgctngcctgaatctagtacataagcaggataatgacaatcactttntgnttataaatttgtagatgtcttattatttcagtcagcatgaggactgcattnatatttgngggtggcagctctcaaanttatttatccatagnccagatttgttttgttgcatttgctctnaaaatgcattgttgtatactccatcacagaaggngtcaaaatactcctgctgcctttnnaaaatgttgcaaaaccctaaacctgtanttttc

SEQ ID NO: 9075 - DNA, 240 bp, Homo sapiens
  unsure (95): n=A,T,C or G
  unsure (142): n=A,T,C or G
  unsure (159): n=A,T,C or G
  unsure (160): n=A,T,C or G
  unsure (180): n=A,T,C or G
  unsure (182): n=A,T,C or G
  unsure (230): n=A,T,C or G
cctcgccagcctcagtcaaatgtaacgttcctaggccaagccacgaattgcccaactgggtggtccggctgccctgctatctcacttgtttgtgngcttattgtcaactctacctatgaggagtgagctcctaaaagcaganatttgggcagcgcaggnngctcacacctgtaatcccancnctttgggaggatgaggcggggcggatcacctgagctcaggagttcaanaccagcctgg

SEQ ID NO: 9076 - DNA, 194 bp, Homo sapiens
  unsure (15): n=A,T,C or G
  unsure (70): n=A,T,C or G
  unsure (75): n=A,T,C or G
  unsure (86): n=A,T,C or G
  unsure (102): n=A,T,C or G
  unsure (132): n=A,T,C or G
  unsure (161): n=A,T,C or G
  unsure (162): n=A,T,C or G
  unsure (167): n=A,T,C or G
  unsure (186): n=A,T,C or G
tttggggctcccagnggttccctaaatttgagggatggaggaagacttcccttgccccaccccaagcctnccgancctggtggatnggtccctgtccccacncaacctggtggcacgggtggggcttcccgngctaataacccccctttttccttcttgtnngaccngctcccctcaaaagcttcncgccaaca

SEQ ID NO: 9077 - DNA, 80 bp, Homo sapiens
  unsure (1): n=A,T,C or G
  unsure (24): n=A,T,C or G
  unsure (25): n=A,T,C or G
  unsure (57): n=A,T,C or G
  unsure (61): n=A,T,C or G
  unsure (66): n=A,T,C or G
  unsure (80): n=A,T,C or G
ntatacagcacttatatcttttannccacaaccgatattatttaaatgatatgacancatntaatncaaccatttctccn

SEQ ID NO: 9078 - DNA, 345 bp, Homo sapiens
  unsure (308): n=A,T,C or G
ctgctgcacatgatgcaggaatcactatcttctctgttggtgtggcttgggcacctctggatgacctgaaagatatggcttctaaaccgaaggagtctcatgctttcttcacaagagagttcacaggattagaaccaattgtttctgatgtcatcagaggcatttgtagagatttcttagaatcccagcaataatggtaacattttgacaactgaaagaataagtacaaggggatccagtgtgtaaattgtattctcataatactgaaatgctttagcatactagaatcagatacaaaactattaagnatgtcaacagccatttaggcaaataagcactctcttt

SEQ ID NO: 9079 - DNA, 167 bp, Homo sapiens
  unsure (18): n=A,T,C or G
  unsure (21): n=A,T,C or G
  unsure (129): n=A,T,C or G
  unsure (145): n=A,T,C or G
  unsure (147): n=A,T,C or G
  unsure (156): n=A,T,C or G
  unsure (160): n=A,T,C or G
aaaactcttataataagngtnctaatagtaatatgaaacctgcttactgctcctttgtctgatacctgcatttctccaaatgataaaaaactttgtcacgaccttagttcaccaaaatgctttagcagnaagcatactatctaancncactatcantctnttgcaca

SEQ ID NO: 9080 - DNA, 244 bp, Homo sapiens
  unsure (3): n=A,T,C or G
  unsure (134): n=A,T,C or G
  unsure (149): n=A,T,C or G
ggnatctggcaggtgctaaataaatgtttcctggatcgaaatctacagtctcaaggagtcaaggctacaattcttaagttgcttcagatgactggttctatctatttatcaatacatccatcgatccactcatncctcatccatgcatnctcctacccttcctcttccccgtcaaacattcatccatccaattggtggcttggggaaagggacaaaaaggggaaaaaaaaaaaaaaaaaaggaa

SEQ ID NO: 9081 - DNA, 296 bp, Homo sapiens
  unsure (197): n=A,T,C or G
  unsure (243): n=A,T,C or G
cctctgagcagaacgaggtaaatcttcactgttagctacaaagagcactgcatgaaagtgtgtgcaagatgactccatgaggttttctttttaagtttatgtatatttacagaaaagtgaaatgtgttggaagaataaacaccccttcttgtggacacttttagagaggagaattttgggctgggaaaaaaggagancctttttatttttttgctgctctctactgtttgtcttttctgtagntaatattaatattaattgtattaatattctgactttaatattagaaacttttt

SEQ ID NO: 9082 - DNA, 149 bp, Homo sapiens
  unsure (120): n=A,T,C or G
aaagaaatatataactatttattaaccactgttcagtatttacaataaagtaaacaatatacagttggataacattttgattactacaaagttgttcttcctggcttttgctgaaccagnaaagcaaactcaagattgagcctccatgt

SEQ ID NO: 9083 - DNA, 338 bp, Homo sapiens
  unsure (34): n=A,T,C or G
  unsure (256): n=A,T,C or G
ttcgaatcaccctaacaagccgcaacggaaaatncttggaaaaggtgtgtgctgacttgataagaggcgcaaaagaaaagaatctcaaagtgaaaggaccagttcgaatgcctaccaagactttgagaatcactacaagaaaaactccttgtggtgaaggttctaagacgtgggatcgtttccagatgagaattcacaagcgactcattgacttgcacagtccttctgagattgttaagcagattacttccatcantattgagccaggagttgaggtggaagtcaccattgcagatgcttaagtcaactattttaataaattgatgaccagttgttaa

SEQ ID NO: 9084 - DNA, 170 bp, Homo sapiens
  unsure (40): n=A,T,C or G
  unsure (43): n=A,T,C or G
ccatttatgaagatgaagaatacagtcagctttgtgaaanagnattgcaagcaagccccgtgggcaaatttgtattgagtccatctgtaatttgctcagtgatggcagacaagatggctgtctggttttgagacacactttaattttatgttaacttgttaaatcttttt

SEQ ID NO: 9085 - DNA, 600 bp, Homo sapiens
  unsure (11): n=A,T,C or G
  unsure (546): n=A,T,C or G
  unsure (549): n=A,T,C or G
  unsure (562): n=A,T,C or G
  unsure (563): n=A,T,C or G
  unsure (595): n=A,T,C or G
ctgttagagtntttagagtcctgagataacaaggaatccaggcatcctttagacagtcttctgttgtcctttcttcccaatcagagatttgtggatgtgtggaatgacaccaccaccagcaattgtagccttgatgagagaatccaattcttcatctccacgaatagcaagttgcaagtgacgaggggtaatacgctttacctttaagtcttttgatgcatttcctgccagttcaagtacctctgcggtgaggtactccaggatggctgcgctgtacacagcggcagtcgcgcccacacgtccatgactggtcgtcctagattttaggtgtcgatgaatacggcccactgggaactgcaagccggctctctgcgagcgggaaaccgcctttgtcttggcctttccggagtcctttccagccttaccgccagccatttcgaattccgctgaagctcaagcaagcaaggcagagaaaaggctaatcggacccaccggtgagatcccaccacctactcctttcgacctgcccgggcggggcgctcaaanggncgaattcttgcannatatccatcacacctgggcggggcgcttcgangcatg

SEQ ID NO: 9086 - DNA, 373 bp, Homo sapiens
  unsure (44): n=A,T,C or G
ctgtagcttttgtgggacttccactgctcaggcgtcaggctcanatagctgctggccgcgtacttgttgttgctttgtttggagggtgtggtggtctccactcccgccttgacggggctgctatctgccttccaggccactgtcacggctcccgggtagaagtcacttatgagacacaccagtgtggccttgttggcttgaagctcctcagaggagggcgggaacagagtgaccgagggggcagccttgggctgacctaggacggccagtttggtccctccgccgaagacgacatggtcattattacgatcccacacttgacagtaatagtcggcctcatcgccggcttcgaccctgttgatggtcagggtgg

SEQ ID NO: 9087 - DNA, 474 bp, Homo sapiens
  unsure (445): n=A,T,C or G
  unsure (457): n=A,T,C or G
tctgaattttattagagctcacacaccatatattaacatatacaactgtgaaccagctaatccctctgagaaaaactccccatctacccaatactgttacagcatacaatctctgttcttgggcattttgtcagtgatgctgatctttgccttcttccaggaacttgtaatagctggcatcgttgagaatgaatggaaaagaacgtgctccagacccaaatctaacatagttctcctgtcagcagaagaaaaaaagaacagactattgaaataaaagaagaagtggttgggctaactgaaacatcttcccaaccaaagaatgaagaagacattgaaattattccaatccaagaagaggaagaagaaagaaacagagacgaactttccagaacctccccaagatcaggaatcctcaccaatagaaaatgacagctctccttaaggngatttcttctgntttctggttcctttttt

SEQ ID NO: 9088 - DNA, 383 bp, Homo sapiens
  unsure (2): n=A,T,C or G
  unsure (29): n=A,T,C or G
  unsure (146): n=A,T,C or G
  unsure (239): n=A,T,C or G
  unsure (247): n=A,T,C or G
  unsure (286): n=A,T,C or G
  unsure (326): n=A,T,C or G
  unsure (329): n=A,T,C or G
  unsure (376): n=A,T,C or G
  unsure (379): n=A,T,C or G
tngcaactaaagacacaagcctgaagaangaactattgaggatacctccaccgtctcccaaaacaagaaagaatcacattgatttaagataaaattttgccataagtcactaaattaagagtttttcgaaagagaaggcgcagtantcatcgtgagtgtttcactgaaagacagagctattttatttatttaatttgctccagccgttggcaaccagccactacaaatgggcctcttgngatcattnaaccggcagtatttattaaatttgtccttcagatgctgncggtattgttctctattgctgtagaaagactggttattanccntaaatgactgtatttcatcttgtgagataaagatttcctgatctganccncatt

SEQ ID NO: 9089 - DNA, 597 bp, Homo sapiens
  unsure (9): n=A,T,C or G
  unsure (10): n=A,T,C or G
  unsure (47): n=A,T,C or G
  unsure (495): n=A,T,C or G
  unsure (524): n=A,T,C or G
  unsure (544): n=A,T,C or G
  unsure (569): n=A,T,C or G
  unsure (584): n=A,T,C or G
aaataaganntttctttaatcaggtatccctttggactgggagagcngtttatatcatagctttgcagcataatctttttactctcaggctcttcaagcatttttatcttctttgaaacttctatctaaacaaaaatagtattaaaaaagataacagaaggggttagattctgccaatgaactgtggacatcagtatctcattcttctatttgcctccttattctagtttgaaaaagctttggaacacattattacctatcattattacatatttcttgtagctttagtgttactcccccgactggaaatagaagttgctctttaataaggcccagggtgcttagggagcaatgcgagatttttcttacatctcttgggccaaccctatacaactaattctgggaaagggattgttataatacactgtccttgaaaagtttctttcagtccatttggagaaatgttgggataaagataacttagtgcttacaagntgctctattattagtaggtataataaccntaattattattaaacctaanagttatctattactttatcaccctntctccaatttatggntttctcctctttt

SEQ ID NO: 9090 - DNA, 305 bp, Homo sapiens
ctgtcttttggaggacgtacgtaataaggttttaatttagtaaaccaatcctatgcatggtttcagcactagccaaacctcaccaactcctagttctagaaaaacaggcacttggcagccttgtgatgtcatacagagaagtcacagggcagtacctgagggtctgtaggttgcacactttggtaccagataactttttttttctttataagaaagcctgagtactccacactgcacaataactcctcccagggttttaactttgttttattttcaaaaccaggtccaatgagctttctgaacag

SEQ ID NO: 9091 - DNA, 664 bp, Homo sapiens
  unsure (10): n=A,T,C or G
  unsure (11): n=A,T,C or G
  unsure (29): n=A,T,C or G
  unsure (48): n=A,T,C or G
  unsure (54): n=A,T,C or G
  unsure (149): n=A,T,C or G
  unsure (219): n=A,T,C or G
  unsure (236): n=A,T,C or G
  unsure (256): n=A,T,C or G
  unsure (344): n=A,T,C or G
  unsure (462): n=A,T,C or G
  unsure (500): n=A,T,C or G
  unsure (521): n=A,T,C or G
  unsure (636): n=A,T,C or G
  unsure (638): n=A,T,C or G
  unsure (640): n=A,T,C or G
  unsure (651): n=A,T,C or G
  unsure (658): n=A,T,C or G
ctgaggcatnnttcctgggccagagtcgngtccaccaagggacagtanccaganctcctcttcctttaccaggcaaggtgcatcccctcagccctcctggcccttcagtcttggtgccacctgggcacaggggcaagcttggtggctgngagtccattcatctatcagagctggaacctcatccctgcacagatgaggaaaccaaggcatggagcagtncccagagtcgaatctanatctcatctgtcatccgggncttatcctttgctctgtttttctcttcaggctctggaaaatcagatctgtgacttaatcttcctctccctggccctcacccacttagnttctttttcattcctgctccctgccttaactcctcctcccactgcccctgatcccaggcccaggcttttacaacctggtgctcagcttccccatcagttgaaaaggggtggctagagnaactaacctcagcaggccgtccagccttgatagtctgnggatttcggatccttctcaangaagcttcatgtctaatgggagactataattataactcctgttctgcatagagcatttgcatcaaaggctttccatacccctccctcccctggtcctcataagaatccttgaagnangntcctattcctnattggcnaccatg

SEQ ID NO: 9092 - DNA, 451 bp, Homo sapiens
  unsure (138): n=A,T,C or G
  unsure (141): n=A,T,C or G
  unsure (159): n=A,T,C or G
  unsure (162): n=A,T,C or G
cctacagacttatttcttcttggacacacccacggtgcggccacggcggccagtggtcttggtgtgctggcctcggacacgaaggccccagaagtgacgcagccctctatgggcccgaatcttcttcagtcgctccangtnttcacggagcttgttgtncanaccattggctaggacctggctgtattttccatcctttacatccttctgtctgttcaagaaccagtctgggatcttgtactggcgtggattctgcataatggtgatcacacgttccacctcatcctcagtgagttctcccgccctcttggtgaggtcaatgtctgctttcctcaacaccacatgagcatatcttcggcccacacccttaatggcagtgatggcaaaggctattttccgcgcccatcgatgttggtgttgagtactcgcaaaatatgctggaacttttcag

SEQ ID NO: 9093 - DNA, 409 bp, Homo sapiens
aaagtcatgtttattgaagtatgattttacattcagcaaaattcatcctgttaaggtttgacaaacgcacagtcataccataatcaagatgcagaactgtagaatcacactaacaattccttcctgcccttgtaatcaacccctttttgatcccaaggaactcactgacctgtttttctgtcaaaagtatcaaatttcatcactaaaatgatctacagtactatggaaaaatgtgtaagcacataaaatacacaaacctatttttttaaaaatgagatacttaaaatttctttagcataccaacaaaaaatgaaggtagcattgcattttactacagatgtgcggacattcaaagtccaccattgtcgtatatatggctcaacagtaatatttaagaatatactgctgg

SEQ ID NO: 9094 - DNA, 215 bp, Homo sapiens
  unsure (13): n=A,T,C or G
gttgtctaccttnttttcttcctcatttccttcttttattcctccccaccccaaccccttaaaaaaaaggtcagaaggacaaagctggtttgtttgggaaatggactgatcgaaagaaaacttgccaaagtggaaaggtggcttttagcattctgtgtttccaaataatgaatttgaacaccaggttgggttaattaaagcttttggtataattt

SEQ ID NO: 9095 - DNA, 408 bp, Homo sapiens
  unsure (245): n=A,T,C or G
  unsure (373): n=A,T,C or G
  unsure (377): n=A,T,C or G
ctgcaatgtggccttgattttctcatcagtaaaatgggaaagctggatttggaggctggaagagatctcacagcttgaccaccctagtaggagggagggagaccagacggaggccaggcaaccgacccaggcagcatctggctcagacgcagacacatcttcatgttgagggacctattcttacacagcaaaacccagagaagtcgactgctcagcctgagcctgtcatccctatatagactcancttttaggagaagagggagagttgaggagatagcatcgctctctgtatcagtgtctgatgatctggagtctgcccctggggtcactcagtcactcaacaaacatttgttgagctcttaacgtctatangggngtgagctctgcccttcgaggctgtatgtctc

SEQ ID NO: 9096 - DNA, 373 bp, Homo sapiens
caggacacagcatggacatgagggtccccgctcagctcctggggctcctgctgctctggctcccaggtgccaaatgtgacatccagatgacccaatctccttccaccctgtctgcatctgtcggagatacagttacaataagttgtcgggcctctcagaatatagatcggtggttggcctggcatcaacagaaaccaggcaaagcccctaatgtcctaatttatgcgacttccagtttagaagaaggggtctcattaagatttactggcagtggatctgggacacaattcaatttaaccatcaccagtctgcagcctgacgattcagcaacttattattgtcaacattattctgcatctcttcgcagttttgg

SEQ ID NO: 9097 - DNA, 482 bp, Homo sapiens
  unsure (304): n=A,T,C or G
  unsure (362): n=A,T,C or G
  unsure (384): n=A,T,C or G
  unsure (396): n=A,T,C or G
  unsure (439): n=A,T,C or G
  unsure (443): n=A,T,C or G
cctttggggaactgggatgcttatttcctctgccttccttggctgcccacatggatgcctaagtgtcttccctccgggatagagtgtcctccgtgcacatgctgaagagttgtctttcttgacgtaggccagaggcattgatgtgcagcaggtttctttagtcatcaactatgaccttcccaccaacagggaaaactatatccacaggtaagcgtagatctggaacactcccctaccccttcacacctggccctccctgggcttaaagctcctgatattcctcatccccttccttgttttccanaatcggtcgaggtggacggtttggccgtaaaggtgtggctattaacatggtgacagangaagacaagaggactcttcganacattgagaccntctacaaccctccattgaggaaatgcccctccatgttgctganctcntctgagggggtgtcctgccaccccacccccagccagggg

SEQ ID NO: 9098 - DNA, 117 bp, Homo sapiens
  unsure (26): n=A,T,C or G
  unsure (28): n=A,T,C or G
  unsure (30): n=A,T,C or G
  unsure (85): n=A,T,C or G
ccttggagactcagatcctgaacaanananaacaaaatctctactttgatggaacttccattctgtggggaagagactgacaatnagcaattaaataaataagaactcagcagtagg

SEQ ID NO: 9099 - DNA, 619 bp, Homo sapiens
  unsure (375): n=A,T,C or G
  unsure (507): n=A,T,C or G
  unsure (508): n=A,T,C or G
  unsure (558): n=A,T,C or G
  unsure (563): n=A,T,C or G
aaaagctcagctcgaacctcacggattttcctgacaatctgcttctctcaatggccttaatttaagtgagggttgtcagtcttactgggtctcgttttttgtcttaaataataactatttatgggtatcaagtgtctcctcaatttggctatgatccttcacggcagaaatactgtcttatcttgtgatcatggagtcacaagatttcatggctaggaatattcgtcaaattaatcctagattgaggatcaggtagtatgtggtctgattctaactcaacaacttgcagaaactcacttcttttttctttttttttccccaggaggagctatcgtattaactgacgaaactcacttcatttctttggacctgcanaatgaggatgggctctaaaccacctctaaaggtaatattctatgattccatgataaggctatttgtcatttataaaaaaaggaacttccacatagcccagagaaaggaaatgactttttcaagtttacaganncaattaatggacgaaatataattgtgaaattcaatctcctgatccccagnctatnggggagttctttcaaaatggccccttgactgtccctcaaagtgccagcatgcagga

SEQ ID NO: 9100 - DNA, 431 bp, Homo sapiens
  unsure (178): n=A,T,C or G
  unsure (344): n=A,T,C or G
aaaaagtaagccactgcctcttacctaaaggtcagcatgggcttcatcatacagcggtcaggtccatcatacagcggtcaggtccatcatacagcggtcaggtccatcatatggcggtcaggtccatcatacagcggtcaggtccatcatacggcggtcaggtccatcatacagcggncaggtccatcatacggcgctcaggtccatcatacagcggtcaggtccatcatacggtggtcaggtccatcatacggcggtcaggtccatcatacggcggtcaggtccatcatacggcgctcaggtctgtaactcttgacaggaaggtgcactagcagaatggcganatgcactgagggtaaccagatgatctcatgggacttacccagtgttagcaccaaagtcccatgaactgaggtgctaaaacataaagg

SEQ ID NO: 9101 - DNA, 533 bp, Homo sapiens
  unsure (268): n=A,T,C or G
  unsure (287): n=A,T,C or G
  unsure (308): n=A,T,C or G
  unsure (354): n=A,T,C or G
  unsure (410): n=A,T,C or G
  unsure (423): n=A,T,C or G
  unsure (457): n=A,T,C or G
  unsure (465): n=A,T,C or G
  unsure (509): n=A,T,C or G
  unsure (510): n=A,T,C or G
  unsure (530): n=A,T,C or G
aaatcttactatcaactattcttaacaggctaaaggttggtcttcaggttgtggcagtcaaggctccagggtttggtgacaatagaaagaaccagcttaaagatatggctattgctactggtggtgcagtgtttggagaagagggattgaccctgaatcttgaagacgttcagcctcatgacttaggaaaagttggagaggtcattgtgaccaaagacgatgccatgctcttaaaaggaaaaggtgacaaggctcaaattgaaaaacntattcaagaaatcattgancagttagatgtcacaactagngaatatgaaaaggaaaaactgaatgaacggcttgcaaaactttcanatggagtggcctgtgctgaaggttggtgggacaagtcgatgtttgaagtgaatganaagaaagacaganttacagatgcccttaatgctacaagagctgctgntgaagaangcattgttttgggagggggttgtgccctccttccatgtattccnnccttggactcattgactccncct

SEQ ID NO: 9102 - DNA, 519 bp, Homo sapiens
  unsure (1): n=A,T,C or G
  unsure (26): n=A,T,C or G
  unsure (418): n=A,T,C or G
  unsure (431): n=A,T,C or G
  unsure (467): n=A,T,C or G
  unsure (482): n=A,T,C or G
  unsure (495): n=A,T,C or G
  unsure (512): n=A,T,C or G
  unsure (519): n=A,T,C or G
ngggtctgggtacttcattattgganggagcaggtatgtggctggcattgaagggttttttggacccctgaagtactatcgccttcgcagtctgcaccccgcccagatttttaatcccctccttgagaagcaacttgctgaacaaatcaagttatattatgaaaggtgtgctgaggttcaaggaatagtatctgtgtatgcatctgcagcaaagcacgggggcgagagacaagaagcatgccacctccacaactcctacctggacctccagcgcaggtatgggagaccctcgatgtgcagagccttcccctgggagaaggagctgaaagacaaacaccccagcttgttccaggcattgctggagatggatctgctgaccgtgccaaggaaccaaaatgaatctgtatcagaaatcggngggaagatatttngagaaggctgtaaagagactctctagcattgatggncttccccaaaattanctctatcgccccnttctgacggattcccancctcggn

SEQ ID NO: 9103 - DNA, 381 bp, Homo sapiens
  unsure (1): n=A,T,C or G
  unsure (2): n=A,T,C or G
  unsure (240): n=A,T,C or G
  unsure (344): n=A,T,C or G
  unsure (373): n=A,T,C or G
nncatggcccaccacctgcccttcagtgttcaagcaggggacatgcaccctttagtaacctggaggggacccatcacatgacaaccaccccaatgaccatcatcaggaagccgctgcctgactgagatatgcccccaggaggacaagggagagtggatgctggaaagacagggcaggggaccatcaccagggaaagacttcattcttcggaggacattgaacctggggctgggtctgtancggagccgctgtttcttctcctgtatccaactgttctaactcttgggctttctccattttcagctctttcttttcctggccttctcattgctggttccttcaancctcctctctattcttccgacaatatatncttttttt

SEQ ID NO: 9104 - DNA, 459 bp, Homo sapiens
  unsure (1): n=A,T,C or G
  unsure (23): n=A,T,C or G
  unsure (376): n=A,T,C or G
  unsure (411): n=A,T,C or G
  unsure (413): n=A,T,C or G
  unsure (416): n=A,T,C or G
  unsure (456): n=A,T,C or G
naaaattgatcacaacgaggganaacaaaataaaattagggggcaaagggtaggagtatggggggaggggagagcaaacctatcgaatatatcttagaattttgctcagaaatcactgctgcctctcaagtgttgcattgtccctgcctaaaccaagaaggctaaacaaagcccctcctgtttgaattcttaaggtaagaaatttctaagctaagaaaacactattgcctaaaaccaatgatagtggagctcatttacaaataggcatgcctcacacacacagtccaaaggcaagacactggctttgaaattaggctcatgatgtgattcctattatatgtacctgatttttttaggccccaggtatgtggaccanagttaatgtcatgactcttcaaagatatgatgaananttnccctagaaatctagagatgcatgtttatttaattccatanttt

SEQ ID NO: 9105 - DNA, 140 bp, Homo sapiens
  unsure (1): n=A,T,C or G
  unsure (5): n=A,T,C or G
ncttntgcgccctccctgagcaccggctcaggcaccggggtcaggctgcaggaacacatggacagggagaagtaagagtagtccactgcaacgtatgtcagcatgaagttgatggtgacgatgggggccagaacgttcac

SEQ ID NO: 9106 - DNA, 262 bp, Homo sapiens
  unsure (1): n=A,T,C or G
nggtcctagggcactggaagggtaggaggagcacagagaaccttccatggcccctttggttctctgcctttggatggatggatttatgctggcattgtctggagggagccgggtgtcccccaataatcacagaacaaagacaattaggtcgggggaggaataaggataaaaagagaccccaacagaccctgcctgcccttccctgccccccggctgcactgctgaaatatgaggaagagatggctccagtgtggggtgctgg

SEQ ID NO: 9107 - DNA, 343 bp, Homo sapiens
  unsure (25): n=A,T,C or G
  unsure (147): n=A,T,C or G
  unsure (319): n=A,T,C or G
  unsure (330): n=A,T,C or G
  unsure (341): n=A,T,C or G
  unsure (343): n=A,T,C or G
gggtctgtgtttggtggcccaggtnctaatttcaagatgccaggacgttccagttcaaattcaggttcaactggtttcatctccttcagtggtgtagagtctgctctctcctccttgaaaaacttccaagcctgtatcaactctggnatggacacagcttctagtgttgctttggatcttgtggaaagtcagactgaagtgagtagtgaatatagtatggacaaggcaatggttgaatttgctacattggatcggcaactaaaccattatgtaaaggctgttcaatctacaataaatcatgtgaaagaagaacgtccanaaaaaataccngatttacctcngn

SEQ ID NO: 9108 - DNA, 608 bp, Homo sapiens
  unsure (1): n=A,T,C or G
  unsure (567): n=A,T,C or G
nctgataacgttcacagccccatcctcagcacgtggattcgagtcaccgtgagaacccttttgtctccttcagttccggtatctcaccctgtcctcaccttcagggctcccagggcccacactgtggtgggggacctgctggagcttcactgtgagtccctgagaggctctcccccgatcctgtaccgattttatcatgaggatgtcaccctggggaacagctcagccccctctggaggaggagcctccttcaacctctctctgactgcagaacattctggaaactactcctgtgatgcagacaatggcctgggggcccagcacagtcatggagtgagtctcagggtcacagttccggtgtctcgccccgtcctcaccctcagggctcccggggcccaggctgtggtgggggacctgctggagcttcactgtgagtccctgagaggctccttcccgatcctgtactggttttatcacgaggatgacaccttggggaacatctcggcccactctggaggaggggcatccttcaaacctctctctgactacagaacattctggaaactnctcatgtgaggcttgacaatggccctgggggccccagcaca

SEQ ID NO: 9109 - DNA, 443 bp, Homo sapiens
  unsure (1): n=A,T,C or G
  unsure (25): n=A,T,C or G
  unsure (107): n=A,T,C or G
  unsure (161): n=A,T,C or G
  unsure (167): n=A,T,C or G
  unsure (184): n=A,T,C or G
  unsure (201): n=A,T,C or G
  unsure (228): n=A,T,C or G
  unsure (266): n=A,T,C or G
  unsure (285): n=A,T,C or G
  unsure (301): n=A,T,C or G
  unsure (320): n=A,T,C or G
  unsure (324): n=A,T,C or G
  unsure (331): n=A,T,C or G
  unsure (361): n=A,T,C or G
  unsure (363): n=A,T,C or G
  unsure (373): n=A,T,C or G
  unsure (397): n=A,T,C or G
  unsure (409): n=A,T,C or G
  unsure (411): n=A,T,C or G
  unsure (423): n=A,T,C or G
  unsure (424): n=A,T,C or G
  unsure (441): n=A,T,C or G
ngggtccattgcctcggccccaacnacaccaagcccatcaaggttttcattgctcagtcccgatcatctggaagccaccgagatgttgaagatgaagaacttacaanaatctttgttatgataccaaagtcctacacagaagaagatctgcgggaaaaatntaaggngtatggagatatcgagnattgcaccattattaanaataaagtgactggagaaagtaaaggnttgggctacgtacgatacttaaaaccatcacaagctgnccaagcaatagaaaactgngatcgaagctttaganccaatcttggctgaacctnaaantaaagcntctgaatcctctgaacaagattattatagnantatgaggcangaagctctgggacatgaaccctanaataaatatgtntncatttggcaagnngcgccacctttactttnaa

SEQ ID NO: 9110 - DNA, 541 bp, Homo sapiens
  unsure (1): n=A,T,C or G
  unsure (257): n=A,T,C or G
  unsure (380): n=A,T,C or G
  unsure (385): n=A,T,C or G
  unsure (391): n=A,T,C or G
  unsure (392): n=A,T,C or G
  unsure (428): n=A,T,C or G
  unsure (433): n=A,T,C or G
  unsure (477): n=A,T,C or G
  unsure (500): n=A,T,C or G
  unsure (503): n=A,T,C or G
  unsure (509): n=A,T,C or G
  unsure (511): n=A,T,C or G
  unsure (526): n=A,T,C or G
nagaaagtggttgtgatcacaaagcacaacgatgatgaacagtatgcttgggagtcttctgctggaggttccttcactgtgcgtgctgaccatggtgagcccattggcaggggtaccaaagtgatcctccatcttaaagaagatcagacagagtacctagaagagaggcgggtcaaagaagtagtgaagaagcattctcagttcataggctatcccatcaccctttatttggagaaggaacgagagaaggaaattantgatgatgaggcagaggaagagaaaggtgagaaagaagaggaagataaagatgatgaagaaaagcccaagatcgaagatgtgggttcagatgaggaggatgacagccggtaaggataacgaanaacanaactannaagatcaaagagaaatacattgatcaggaagaactnaacangaccaagcctatttggaccagaaaccctgatgacatcccccaanacgagtattggagaattctacanganccctcncntaatgactggggaanaccacttggcagtca

SEQ ID NO: 9111 - DNA, 264 bp, Homo sapiens
ggaacatactgagttaacacattttcctagtagtgatagaattttcagggaagcaagaaaccaagaaaattctggctgctacctaattttaatgaagttggcgattatctgcccacaaggtatgagaagtatagatgtgcattgctctacaaatatacaacgcaataaggcccactcgaaattcatgaaaggcttgccaagccacatggcttgattggtcgtaggtagatgcatgatgtccctcttagaatgaggcccatgttt

SEQ ID NO: 9112 - DNA, 333 bp, Homo sapiens
  unsure (1): n=A,T,C or G
  unsure (173): n=A,T,C or G
  unsure (215): n=A,T,C or G
  unsure (272): n=A,T,C or G
  unsure (310): n=A,T,C or G
ncctgcttcacttgcagataagtttattataattctccagaaatgtgcaggatgtgcattagcaaattgcactgtacttttcactccagcctgggtgacagagcaagactcccgtctcgggggcttaaaaaaaaaaatgctgtatctaaatgaatctgtgtaattgggcccanatgtgggtttgctcagtattagtagacaaggtctttgttcanacgattaggtgcctaactggcaaatgccttagtttcttaaaacgtattttctgatgnggctttacatttcaaaagtgaacttgattcaacctganaaaactgattaaaaaattagttt

SEQ ID NO: 9113 - DNA, 380 bp, Homo sapiens
  unsure (1): n=A,T,C or G
  unsure (8): n=A,T,C or G
  unsure (285): n=A,T,C or G
  unsure (297): n=A,T,C or G
  unsure (328): n=A,T,C or G
  unsure (357): n=A,T,C or G
naaatcanacgtgtaggtttgctttgtattgccctgcatgacacatgtcaggaagatcgccagggaggggaggttacaagcccaggttgcaggaataacctttactctgaattttggtctgaaagacttttccttcgtctggagctgggctggccttgtgatattgtgccacagcagacacgacactgtctccaaggcggagctcattgcctggggctttcccactgcactgaatgagaatttatttggcctttaatgaaattcagattgtcccatttatgcagncctctgtttaangtgacaggcactgaatatggttgctttcaancaagttattttgtttaaccaggggcctancggagttcgggatacacagatgg

SEQ ID NO: 9114 - DNA, 623 bp, Homo sapiens
  unsure (6): n=A,T,C or G
  unsure (487): n=A,T,C or G
  unsure (516): n=A,T,C or G
  unsure (582): n=A,T,C or G
  unsure (621): n=A,T,C or G
ctgaanaagggaagggcagtgatggggttatggaggaagtatggcagggaaagcaggagggtgatgctggaagacaaatggtagatcccaggcggactggaaagaattgcaatagggggagccggggagtgcagtctgtgagaggctggaaatgtgaaagccaggagctctcagggatttgggttgcctcctgcacagtcaaggagagtgtcactcaggctagtcatagatggcatacctacaggcttgggctgattttagatagttgttcagagcagtcaggcaggcgccagaggcacaagccctgtgagaggtgtgtttggaatcacttggtatccaaatcacatgtcatccctaggagcaaggagaccggttggatttggggctggtctggaatgaagaagcatctctcagcttccgaaggctgcatggctcacggcagtatctcaatcatgccctgcccgtttgcacatttggtcctgttggnagttacctctctggtgactggcaaagtcngcaaggatattggggtggagcaccctggctaagcaccctcttgattatagagctatggagtacaanacagatggagaatgagaggacctgccccgggcgggcccnct

SEQ ID NO: 9115 - DNA, 311 bp, Homo sapiens
  unsure (1): n=A,T,C or G
  unsure (213): n=A,T,C or G
  unsure (222): n=A,T,C or G
  unsure (283): n=A,T,C or G
nggtctgggtcagtgctgctctctaaatctttaagttttgttcttctgtactcgctttccctattttcattgctttagttctgcccttcatcatcttgcctgaattagtataaattttctaacaggtctctctgcctccagtatcatacctctctaatcttaagtataaatgtgattatctttttcctgtttgaaatccttcaattacagttncagacacanatctcttcatgatttatcacctgtttacctcttcagacatagcaactttttttttttgganacagagtctcattctattgcccaggtta

SEQ ID NO: 9116 - DNA, 511 bp, Homo sapiens
  unsure (369): n=A,T,C or G
ccagcggaaagttttatttacctgtttcaagaggaatgataaacgtgaagtaaaagttgcccagttggctggctctgttgctgagatgtcggcttatcatcatggagaacaagcattgatgatgactattgtgaatttggctcagaactttgtgggaagtaacaacattaacttgcttcagcctattggtcagtttggaactcggcttcatggtggcaaagatgctgcaagccctcgttatattttcacaatgttaagcactttagcaaggctactttttcctgctgtggatgacaacctccttaagttcctttatgatgataatcaacgtgtagagcctgagtggtatattcctataattcccatggntttaataaatggtgctgagggcattggtactggatgggcttgtaaactacccaactatgatgctagggaaattgtgaacaatgtcagacgaatgctagatggcctggatcctcatcccatgcttccaaactacaaaaacttt

SEQ ID NO: 9117 - DNA, 617 bp, Homo sapiens
  unsure (1): n=A,T,C or G
  unsure (3): n=A,T,C or G
  unsure (13): n=A,T,C or G
  unsure (546): n=A,T,C or G
ngncttgcctcanatccaaggtcactcggaagaggccatgtctaccctcaatgacactcatggaggaaatgctgagagaagcattcagatgcatgacacaaggtaagactgccaaaaatcttgttcttgctctcctcattttgttatttgttttatttttaggagttttgagagcaaaatgacaacacccagaaattcagtaaatgggactttcccggcagagccaatgaaaggccctattgctatgcaatctggtccaaaaccactcttcaggaggatgtcttcactggtgggccccacgcaaagcttcttcatgagggaatctaagactttgggggctgtccagattatgaatgggctcttccacattgccctggggggtcttctgatgatcccagcagggatctatgcacccatctgtgtgactgtgtggtaccctctctggggaggcattatgtatattatttccggatcactcctggcaccaacggagaaaaactccaggaagtgtttggtcaaaggaaaaatgataatgaattcattgancctctttgctgcatttctggaatgattctttcaatcatggacatacttaatattaaaatttcccatttttt

SEQ ID NO: 9118 - DNA, 214 bp, Homo sapiens
  unsure (1): n=A,T,C or G
nggtctgaataggcacccaaaagtccgtgactaaatttcgtttgtctttttgatagcaaattatgttaagagacagtgatggctagggctcaacaattttgtattcccatgtttgtgtgagacagagtttgttttcccttgaacttggttagaattgtgctactgtgaacgctgatcctgcatatggaagtcccacttcggtgacatttcctgg

SEQ ID NO: 9119 - DNA, 357 bp, Homo sapiens
ccacactgtgaaccctcccagagactttagacagagagaggggctccacaacaccccggtattctgtctgccctctctcacccccttccctgtccacacaggtcagcccaaggccaaccccactgtcactctgttcccgccctcctctgaggagctccaagccaacaaggccacactagtgtgtctgatcagtgacttctacccgggagctgtgacagtggcctggaaggcagatggcagccccgtcaaggcgggagtggagaccaccaaaccctccaaacagagcaacaacaagtacgcggccagcagctacctgagcccgacgcccgagcagtggaagtcccacagaagctacag

SEQ ID NO: 9120 - DNA, 457 bp, Homo sapiens
  unsure (4): n=A,T,C or G
  unsure (9): n=A,T,C or G
  unsure (21): n=A,T,C or G
ctgncttancaagcaccctangagcatgaatatacaaagaccacaagcttacacatctttttaacatacacaaccgattttacttacctagccaaggcatattcttcctgtgcggtacctccacctacctctgctaccctatcaactggactggtacctgtactctggtttttctaagcccaaaaatcgacattgtcccaggagaacaaaacctacctatccctgtaaaaactcaagtgtgccaatgcagggccgttcagttaatacccatcctagtacgactaggaatgactactgcagttggaaccggagtggtcgggctttctacttccctcatgtactattgctccctctcacaagatcttacaaacagtttggaagacttacctaatactgtttcaaccctccaatcacagatagactccttagcagcagttgtccttcaaaatcgcagagg

SEQ ID NO: 9121 - DNA, 241 bp, Homo sapiens
aaatgacccgtaactaaatcctagatttttatctagtcagtttctttttttccaagtcctatctttcacagttgtgcttctgggatttactcacagccatactaactgggagtcaagaaaagggataaggggaataacggggcttagtaagctctggaattactggatgaacacatcttatgagatgaaacaatgacaggaacgctaccaaggcagcagtgtcaccgcatttgacgttttt

SEQ ID NO: 9122 - DNA, 347 bp, Homo sapiens
  unsure (1): n=A,T,C or G
  unsure (37): n=A,T,C or G
  unsure (38): n=A,T,C or G
  unsure (163): n=A,T,C or G
  unsure (173): n=A,T,C or G
  unsure (239): n=A,T,C or G
  unsure (243): n=A,T,C or G
  unsure (245): n=A,T,C or G
  unsure (258): n=A,T,C or G
  unsure (299): n=A,T,C or G
  unsure (347): n=A,T,C or G
nggtccgccgcggactccggcagctttatcgccagannccctgaactctcgctttctttttaatcccctgcatcggatcaccggcgtgccccaccatgtcagacgcagccgtagacaccagctccgaaatcaccaccaaggacttaaaggagaagaaggaagntgtggaagangcagaaaatggaagagacgcccctgctaacgggaatgctaatgaggaaaatggggagcaagaggcngacnangaggtagacgaanaagaggaagaaggtggggaggaagaggaggaggaagaatanggtgatggtgaggaagaggatggagatgaagatgaggaagctgagtcn

SEQ ID NO: 9123 - DNA, 204 bp, Homo sapiens
ctggtcctccagccgcctcagctccttcacagagctctcctggaaggactcctgggtcatgctggtcccagagagagaagagtaagcctcggatctctttggtgggaggtaaggccacaccaaagatgaaagaggaccccctagtgggctcccgtcaggagagcgggtgcccagcactcattgtgaacctgagaaggggcaagg

SEQ ID NO: 9124 - DNA, 356 bp, Homo sapiens
  unsure (23): n=A,T,C or G
  unsure (24): n=A,T,C or G
  unsure (45): n=A,T,C or G
  unsure (114): n=A,T,C or G
  unsure (124): n=A,T,C or G
  unsure (206): n=A,T,C or G
  unsure (216): n=A,T,C or G
  unsure (224): n=A,T,C or G
  unsure (225): n=A,T,C or G
  unsure (233): n=A,T,C or G
  unsure (262): n=A,T,C or G
  unsure (292): n=A,T,C or G
  unsure (297): n=A,T,C or G
  unsure (315): n=A,T,C or G
  unsure (343): n=A,T,C or G
  unsure (356): n=A,T,C or G
gcctggtaggttaaggaacagannacattttgagagacgcttggngccaatgaagtggctgaagaaatgtctggatacaggttttccaatttaccatttgtgtctggggatagngggaggcagncccatctatggcttggggaggctgtagccattcctcctctttcccttgtaagagtgagaaacccatccatggccttctctantcaatacagnggcctggnntgaattanacaaaggaatcccctttgggaggatacancccctatgccaggatgtatggcatggtgancagantgcaccgctttcacttgnttctttggctaggagtgtttgcgcagtnccccaaccacacn

SEQ ID NO: 9125 - DNA, 622 bp, Homo sapiens
  unsure (383): n=A,T,C or G
  unsure (401): n=A,T,C or G
  unsure (451): n=A,T,C or G
  unsure (535): n=A,T,C or G
  unsure (537): n=A,T,C or G
  unsure (568): n=A,T,C or G
  unsure (614): n=A,T,C or G
  unsure (617): n=A,T,C or G
ctggcagctcacattttacattagagagtggggtccccacattttacattacagagcggggtccctgagctgcaggaggagagcctgcagggctcttgggtagaattgcacttttgcaataagggaaacgggagcaatgtttcagcctcagtttctatttataatactgacacaaaaagaatattgctggatacatagcatggatctagatagagcagctccaggagttctcacggtgacagcccccctcactcacagacaccatgtgatattaatagggcttagacacaaagcactgaattcccaaagcattgaagagaaagacagctctcagtctgagtaaaaccgtattgagagaagaaaagaggttgaaagaatcttanagacaaattcagattacntgtaacattggtcaaattgaccagaaaatattcttccaaagaagttcttntctaaacaccaaaagtgcacagctactctcagcatgagaaatacaagtattatgagaaagagggcttattctgagcagaatttncntctctgctgctctcccatctgcccggcccgntgggatttggggaaatctatacttggaacacacctgacaacctccnccngactt

SEQ ID NO: 9126 - DNA, 144 bp, Homo sapiens
  unsure (5): n=A,T,C or G
  unsure (18): n=A,T,C or G
  unsure (40): n=A,T,C or G
  unsure (42): n=A,T,C or G
  unsure (55): n=A,T,C or G
  unsure (58): n=A,T,C or G
  unsure (64): n=A,T,C or G
  unsure (68): n=A,T,C or G
  unsure (79): n=A,T,C or G
  unsure (112): n=A,T,C or G
  unsure (118): n=A,T,C or G
  unsure (120): n=A,T,C or G
  unsure (127): n=A,T,C or G
aaagngagcagcgccaanttccttaaagataagcttgggnanataggagcacacnaanatgagntcanctttgaacagntccatctcttctataaaaaacttatgttttgancagcananatcgatnctcgatgaattcaaaaa

SEQ ID NO: 9127 - DNA, 657 bp, Homo sapiens
  unsure (1): n=A,T,C or G
  unsure (408): n=A,T,C or G
  unsure (521): n=A,T,C or G
  unsure (530): n=A,T,C or G
  unsure (627): n=A,T,C or G
  unsure (641): n=A,T,C or G
nggtaaaattgttttgtattttcttattcctgttccctttaccctttgacaacttgaaatgttaccacttcgtcctcatgatgttcttctatcaaccctgcttaggatgagaacaagttgagcagtgccaacggccatgaagaacgtagcaaaaaacaaactttctgcctccttggaaagctctacatctccttgtgattggagtgtgggtttcaagattccagaaggaggaaaaaaagcaagagcagaagtcgtagtcatgaacgaaagagaagcaaaagtaaggaacggaagcgaagtagagacagagaaaggaaaaagagcaaaagccgtgaaagaaagcgaagtagaagcaaagagaggcgacggagccgctcaagaagtcgagatcgaagatttagaggccgntacagaagtccttactccggaccaaaatttaacagtgccatccgaggaaagattgggttgcctcatagcatcaaattaagcagacgacgttcccgaagcaaaagtccattcanaaaagacangagccctgtgagagaacctattgataatttaactcctgaggaaaagagatgcaaggacagtcttctgtatgcagacctcggccgcgaccccgctaanggcggaattcccancaccctgggcggcccg

SEQ ID NO: 9128 - DNA, 292 bp, Homo sapiens
  unsure (1): n=A,T,C or G
  unsure (89): n=A,T,C or G
  unsure (198): n=A,T,C or G
  unsure (203): n=A,T,C or G
  unsure (217): n=A,T,C or G
  unsure (222): n=A,T,C or G
  unsure (263): n=A,T,C or G
  unsure (284): n=A,T,C or G
  unsure (285): n=A,T,C or G
  unsure (290): n=A,T,C or G
naaatttgaaaagcatcatgttctcatgatttatgggaatgaagcaagtactgaaatcaaattaaatactccctgggtcctgggtcagnttgaccctagccctggggtgaggcaagccccctcctatgaggatgagcaaaaatactactctcttcgccctgagttgctttctggatctggggcttcaggacttgctgnttcantcagcctttattancaccnaagactttatgaagatcccacacacagacacacatcccttncccgcctcccccctgcccttnngtagnat

SEQ ID NO: 9129 - DNA, 113 bp, Homo sapiens
  unsure (2): n=A,T,C or G
  unsure (23): n=A,T,C or G
anataagctgctatcagaagagntatcacttcgatttgcaagttccacagcatcagatgtcacatggtcaagagaatctattcctgatttatccatcaattgctctttgtttt

SEQ ID NO: 9130 - DNA, 431 bp, Homo sapiens
  unsure (2): n=A,T,C or G
  unsure (73): n=A,T,C or G
  unsure (151): n=A,T,C or G
  unsure (154): n=A,T,C or G
  unsure (165): n=A,T,C or G
  unsure (168): n=A,T,C or G
  unsure (182): n=A,T,C or G
  unsure (184): n=A,T,C or G
  unsure (193): n=A,T,C or G
  unsure (261): n=A,T,C or G
  unsure (265): n=A,T,C or G
  unsure (320): n=A,T,C or G
  unsure (344): n=A,T,C or G
  unsure (366): n=A,T,C or G
  unsure (379): n=A,T,C or G
  unsure (381): n=A,T,C or G
  unsure (394): n=A,T,C or G
  unsure (398): n=A,T,C or G
  unsure (404): n=A,T,C or G
  unsure (411): n=A,T,C or G
  unsure (429): n=A,T,C or G
cngatgccccaggaggccggcctggcggaggagttcctgctcactgacaatagtgccatatggcaaacggtanaagaactggattacttacaagtggaggctgaggccaagatggagaacttgcgagctgcagtgccaggtcaacccctanctntggtgctggancanggcctgatataggngngtggccctnacagactgcccgtggtggccccaaggacacccagcccagctatcaccatggcaatggaccttacaacnaccnggacatccctggctgctggtttttcaagctgcctcacaaggatggtaatacctgnaatgtgggaagcccctttgccaangacttccctgcccaaaatggangatggcaccctgnangctggcccaggangtgncagtgngccccgngctctggcaaatcaacanaa

SEQ ID NO: 9131 - DNA, 317 bp, Homo sapiens
  unsure (61): n=A,T,C or G
  unsure (152): n=A,T,C or G
  unsure (159): n=A,T,C or G
  unsure (166): n=A,T,C or G
  unsure (172): n=A,T,C or G
  unsure (208): n=A,T,C or G
  unsure (212): n=A,T,C or G
  unsure (312): n=A,T,C or G
accttttccatgtatgaacctggctctgccctgaagccctttgggggcccccctggggacnagctcactacgcggctgcagcctttccacagcactgagctagaggacgacgccatctattcagtgcacgtccctgctggcctttaccgggnaagcctnggggaancgtgtncatcttaaccagtaggttctgagccccagggggttntggnctctgcgctgaattcggggcttaagatgattagactgaccttggtccctgctgcactgctggtgagcaggggggcagtggggcacactgactccatccancgctg

SEQ ID NO: 9132 - DNA, 224 bp, Homo sapiens
aaacaatgaaactttttcaaaaagaaaaaacaaaaactttaactttgtgtaaaatcttatagtattatcagcttagagggaattgatatttttaatattgccgttatattccaaaatatatattgagataaatgaactggtgtagaatatcagtttgctatttagttttatgaattactatacatatacatgcatagaaatgaaatgctatactgataaatttt

SEQ ID NO: 9133 - DNA, 486 bp, Homo sapiens
  unsure (159): n=A,T,C or G
  unsure (233): n=A,T,C or G
  unsure (253): n=A,T,C or G
  unsure (297): n=A,T,C or G
  unsure (350): n=A,T,C or G
  unsure (358): n=A,T,C or G
  unsure (419): n=A,T,C or G
  unsure (420): n=A,T,C or G
  unsure (443): n=A,T,C or G
  unsure (444): n=A,T,C or G
  unsure (465): n=A,T,C or G
  unsure (470): n=A,T,C or G
  unsure (473): n=A,T,C or G
cctgttctgttcctggaagttcctgtaacattgagtgtcaccactttactgtgctgggcccccaggccattgtcagcctcacatgagtagtttccagaatgttctgtagtcagagagaggttgaaggatgcccctcctccagagtgggccgagatgttncccaaggtgtcatcctcgtgataaaaccagtacaggatcgggaaggagcctctcagggactcacagtgaagctncagcaggtcccccaccacanctgggccccgggagccctgacggtgaggacggggcgagacaccngaactgtgaccctgagactcactccatgactgtgctgggcccccaggccattntctgcatnacaggagtagtttccagaatgttctgcagtcataatagaggttgaaggacgctctcctccnnaggggggctgagctgtttccccnngggtgacatccttcatgatanaaatnggnacagggattcggg

SEQ ID NO: 9134 - DNA, 150 bp, Homo sapiens
  unsure (8): n=A,T,C or G
  unsure (10): n=A,T,C or G
  unsure (146): n=A,T,C or G
  unsure (147): n=A,T,C or G
ttcacaantnccctagcatcatagttgggtagtgttacaagcccatccagtaccaatgccctcagcaccatttattaaaaccatgggaattataggaatataccactcaggctctacacgttgattatcatcataaaggaacttanngga

SEQ ID NO: 9135 - DNA, 229 bp, Homo sapiens
  unsure (189): n=A,T,C or G
ctgcgattttgaaggacaactgctgctaaggagtctatctgtgattggagggttgaaacagtattaggtaagtcttccaaactgtttgtaagatcttgtgagagggagcaatactacatgagggaagtagaaagcccgaccactccggttccaactgcagtagtcattcctaggcgtactacgatgggnattaactgaacggccctgcattggcacacttgagttttta

SEQ ID NO: 9136 - DNA, 204 bp, Homo sapiens
  unsure (1): n=A,T,C or G
  unsure (2): n=A,T,C or G
  unsure (91): n=A,T,C or G
  unsure (134): n=A,T,C or G
  unsure (153): n=A,T,C or G
  unsure (157): n=A,T,C or G
nnttgccccttctcaggttcacaatgagtgctgggcacccgctctcctgacgggagcccactagggggtcctctttcatctttggtgtggncttacctcccaccaaagagatccgaggcttactcttctctctntgggaccagcatgacccangagnccttccatgagagctctgtgaaggagctgaggcggctggaggaccat

SEQ ID NO: 9137 - DNA, 199 bp, Homo sapiens
  unsure (30): n=A,T,C or G
  unsure (31): n=A,T,C or G
  unsure (33): n=A,T,C or G
  unsure (55): n=A,T,C or G
  unsure (163): n=A,T,C or G
  unsure (168): n=A,T,C or G
  unsure (186): n=A,T,C or G
  unsure (196): n=A,T,C or G
taccataagaaaaacacaacagttttaggnngntgataaattaattcctctctgntgtaaacctaaaactaaacaaaaacaaaaatacccagagcagatggggagagggtgggaggcggaacacacactcatacacacacacacactcacgcacacacacaancagtncacgttaagctctgcatncccactatanggg

SEQ ID NO: 9138 - DNA, 113 bp, Homo sapiens
  unsure (3): n=A,T,C or G
  unsure (30): n=A,T,C or G
ttnacaaagagcaattgatggataaatcangaatagattctcttgaccatgtgacatctgatgctgtggaacttgcaaatcgaagtgataactcttctgatagcagcttattt

SEQ ID NO: 9139 - DNA, 235 bp, Homo sapiens
  unsure (34): n=A,T,C or G
  unsure (76): n=A,T,C or G
  unsure (167): n=A,T,C or G
  unsure (219): n=A,T,C or G
  unsure (229): n=A,T,C or G
acaaaagtgtttggagtttgtacttattcctgcnttgaactttatttcttgtctttctattcttacttaagctgtngttatagaaaaccggagcttgagtttctgaaaaagactgatgggctacttctttatagataaaaaggggttcataaattagtgcaaatatnttaggaccttttcagcacttggcgtaggatggaagaggtaagaggtaagaanatactctgtngaagtt

SEQ ID NO: 9140 - DNA, 249 bp, Homo sapiens
  unsure (161): n=A,T,C or G
  unsure (223): n=A,T,C or G
  unsure (245): n=A,T,C or G
aggccaggaaatcaaagagaagatggaacgctgcgacaaagaaggtcagcgccaggaagtataagttggtatctacaaaaattcctttcacctcatcagcatctttctctgaaaacccgaactgctgcagggagtacacggcgtcctgcatgtggatccanaagcgcagccgccccagggagaccttgtcgtaggacacggtgaggggcagctcggtggtggnaagcggattatgaccatcaggnccct

SEQ ID NO: 9141 - DNA, 237 bp, Homo sapiens
  unsure (26): n=A,T,C or G
  unsure (63): n=A,T,C or G
  unsure (75): n=A,T,C or G
  unsure (136): n=A,T,C or G
  unsure (161): n=A,T,C or G
  unsure (187): n=A,T,C or G
  unsure (194): n=A,T,C or G
  unsure (215): n=A,T,C or G
  unsure (226): n=A,T,C or G
caaaatctttataaactgtgtctganaaagtgcacacgtgtgtgtgacatgctcaaaggtcanacaaggggtggncaggaagggatgtattttacaagccacttgtatctttttccaaaaacacctacccatgttnggggaatgttaaacaaaatcaaaanacaaccttttgtagccgttggaagcntcatgtnctttcttctaacttggcttcnccagcggaagngaccgtggtgg

SEQ ID NO: 9142 - DNA, 247 bp, Homo sapiens
  unsure (1): n=A,T,C or G
  unsure (32): n=A,T,C or G
nttatatattcatctataatagcaaagacaanagtgtatcttccagaagatgcctctggttgctaaccagtctctgtgaagaagctgcagttacccaggcttctgtaactcaggacattgaagtagtcatgcagctcggcacagtcccctccccgctgctctccacagagcccagcaggtgcagcttctgcctggacacagcttcctgggggtgagggagcactggggctccattcctcctgtccag

SEQ ID NO: 9143 - DNA, 214 bp, Homo sapiens
  unsure (15): n=A,T,C or G
  unsure (83): n=A,T,C or G
  unsure (208): n=A,T,C or G
  unsure (209): n=A,T,C or G
tttctcaggttgaancaagttcacttttgaaatgtaaagccacatcagaaaatacgttttaagaaactaaggcatttgccagntaggcacctaatcgtctgaacaaagaccttgtctactaatactgagcaaacccacatctgggcccaattacacagattcatttagatacagcatttttttttttttaagcccccgagacgggagnnttgct

SEQ ID NO: 9144 - DNA, 217 bp, Homo sapiens
  unsure (4): n=A,T,C or G
  unsure (6): n=A,T,C or G
  unsure (33): n=A,T,C or G
  unsure (37): n=A,T,C or G
  unsure (73): n=A,T,C or G
  unsure (131): n=A,T,C or G
  unsure (153): n=A,T,C or G
  unsure (164): n=A,T,C or G
  unsure (188): n=A,T,C or G
  unsure (199): n=A,T,C or G
  unsure (208): n=A,T,C or G
tgtntnaaatcatagaatctgctcgaagaaganaatnaggacctgctatccactgggagaggctatcagccantcctgggacttggagacccagcatcctttgcattactttttccttcaggatgatctanagcagcatggagctgttggtanaatattagttnttaaccatacattgtcccaaaagngtctgtgcatngtgcaaaanggaaactta

SEQ ID NO: 9145 - DNA, 254 bp, Homo sapiens
  unsure (119): n=A,T,C or G
  unsure (202): n=A,T,C or G
  unsure (224): n=A,T,C or G
  unsure (225): n=A,T,C or G
  unsure (227): n=A,T,C or G
  unsure (236): n=A,T,C or G
  unsure (248): n=A,T,C or G
ccaaataatgggggagaactgtcagtgcccacacccatttctcagtggtcagtttcagccgctgttgactgaagacaaacgaactcactatgttcttcacaaagatcattttttttaantaagaaaaatgtttcaactctcttgcctttccttcagcgaatgaaatgtgacgggctaaatacgccagtcactcatgcgccgnagggacacatggtgcatactgnngngcccaggtngcaaacagaatncccaag

SEQ ID NO: 9146 - DNA, 166 bp, Homo sapiens
  unsure (17): n=A,T,C or G
  unsure (21): n=A,T,C or G
  unsure (51): n=A,T,C or G
  unsure (58): n=A,T,C or G
  unsure (80): n=A,T,C or G
  unsure (85): n=A,T,C or G
  unsure (88): n=A,T,C or G
  unsure (89): n=A,T,C or G
  unsure (127): n=A,T,C or G
  unsure (129): n=A,T,C or G
  unsure (149): n=A,T,C or G
  unsure (150): n=A,T,C or G
attgtgggtccaccacnccanctttgcttcattttacttctgctgcctctnctttctnttgctaccctgtgctgcatgangaatntannataatttgtaacaccctgggattccttaaagaaaacananaaggactagactcccctttnngggagcaactctctgt

SEQ ID NO: 9147 - DNA, 243 bp, Homo sapiens
  unsure (34): n=A,T,C or G
  unsure (122): n=A,T,C or G
  unsure (180): n=A,T,C or G
  unsure (183): n=A,T,C or G
  unsure (213): n=A,T,C or G
  unsure (222): n=A,T,C or G
  unsure (223): n=A,T,C or G
  unsure (232): n=A,T,C or G
  unsure (242): n=A,T,C or G
ccacttgtgtgggtcctcacaagcaaagagagcnctaaacttgacattgggggtccaccactccaactttgctttctgaaggttttggtgtacattgagccccagaaggaaaggagagtatntgtgagtgggggcctcccttgaccccagtacgaagtctatgccctgaatccccagagnagnccctcctggtgcccaactggcctggggacnaacagcggnncactacatntaggactgcnt

SEQ ID NO: 9148 - DNA, 109 bp, Homo sapiens
  unsure (91): n=A,T,C or G
  unsure (93): n=A,T,C or G
tcaccctgaccatcaacagggtcgaagccggggatgaggccaactattactgtcaagtgtgggatccgtaataatgaccatgtcgtcttcngnggagggaccaaactgg

SEQ ID NO: 9149 - DNA, 510 bp, Homo sapiens
  unsure (472): n=A,T,C or G
  unsure (481): n=A,T,C or G
  unsure (504): n=A,T,C or G
ctgaggacaaacatgagatgagcatagtcagggacagatgtttgggagaaacaaaaggagggtaagtaggaagcgcagggcaaaggcaggcagagcgagtattgcagcagcctttgctgcgtgctgggaagtttctaacaatgcagggctcttggaaagcactgagattgcagcacttgttttgatagcgaggcaaggagtcacaaagtcaggcaaggagggtcatggaaagcggggtgacagagggagaagtccggggcggtggctctcctctaaagcctgtacctagtcctcatctctctccagcctctttacaatgttcatccatggaaagtgaagcccagagaagttaagtaacttgcttaaggtcacacagcagcgttgacaaaaacaaacatacacaaaaaaataaatcacggccaggcacggtggctcacgcctgtaatcccaacattttggaaggctgacgcangaagatcanctgaggtcaggaggtggacaccngcatgg

SEQ ID NO: 9150 - DNA, 293 bp, Homo sapiens
  unsure (1): n=A,T,C or G
  unsure (57): n=A,T,C or G
  unsure (125): n=A,T,C or G
  unsure (155): n=A,T,C or G
  unsure (221): n=A,T,C or G
  unsure (226): n=A,T,C or G
  unsure (243): n=A,T,C or G
  unsure (247): n=A,T,C or G
  unsure (264): n=A,T,C or G
  unsure (275): n=A,T,C or G
  unsure (277): n=A,T,C or G
  unsure (281): n=A,T,C or G
nggtaaatttgagtaatttcaaattccacaaacaaaactgaagaacagcaatatttngtttgaatttctctcttctgtacactcagtgatctaaaacaccacaatatccaacatacacaaacctnagggaagggttagtaaacacacacaagatnggaatcatggtgctctttgttcctgaatggaatggtcccacagaaaaagcacaggatacagcacancatangggcacctgttacatangaantgagcaaaacatactancatcttctatntncatnatggggaaacct

SEQ ID NO: 9151 - DNA, 96 bp, Homo sapiens
  unsure (1): n=A,T,C or G
  unsure (3): n=A,T,C or G
  unsure (5): n=A,T,C or G
  unsure (60): n=A,T,C or G
  unsure (89): n=A,T,C or G
ngncntgaggaagctcttcattggagggttgagctttgaaacaactgatgagagcctgangagccattttgagcactggggaacgctcncggactg

SEQ ID NO: 9152 - DNA, 263 bp, Homo sapiens
  unsure (1): n=A,T,C or G
  unsure (25): n=A,T,C or G
  unsure (89): n=A,T,C or G
  unsure (96): n=A,T,C or G
  unsure (163): n=A,T,C or G
  unsure (167): n=A,T,C or G
  unsure (185): n=A,T,C or G
  unsure (195): n=A,T,C or G
  unsure (206): n=A,T,C or G
  unsure (223): n=A,T,C or G
  unsure (250): n=A,T,C or G
  unsure (256): n=A,T,C or G
nggtctgtgaaaaaagccatttccnaagattctggctgtgactcagtcactgacactgagcctgaggacgagaaggttgtttcctactngaagcancagaacctgccgacggtgacttcacctgggaacctgatggtggtgcagcccggaccgcattcgctgngggncaaaaaccactggctatnttattgtganatgtaagctgnatgacagggtggcgacncgaacgacagttttctcctgaggattntccctntgcaagg

SEQ ID NO: 9153 - DNA, 292 bp, Homo sapiens
  unsure (256): n=A,T,C or G
ccatgtccccagaattgaagccagagaatcgctcagatatccctgagggccggtcgttatcaaaaaagatgattaggacaggggcctggcctggcttctggtaataccagtgtacattgttactcccaatattgtttcccccacaggtaatcttggccgtctttcctggggccactgacactgagggtgtctgagtcaacacataggaggtcacagagtctgtgcagtgagagaggaggccgaggaggagaacggnccaggccatggctgaggcaccaccagtgctgcttcc

SEQ ID NO: 9154 - DNA, 306 bp, Homo sapiens
  unsure (65): n=A,T,C or G
  unsure (161): n=A,T,C or G
  unsure (168): n=A,T,C or G
  unsure (215): n=A,T,C or G
  unsure (230): n=A,T,C or G
  unsure (232): n=A,T,C or G
  unsure (242): n=A,T,C or G
  unsure (255): n=A,T,C or G
  unsure (278): n=A,T,C or G
  unsure (292): n=A,T,C or G
gaaaaaataggacctattttttaagactttacagcctttgaaatggtttccacgtgattgttacnccagcagttctcgttttgtttgtttttcaatctcagtgaaatggctctttgctttcgagttctcacgcaacgtactgggcaaatgacaatcctcanccgctgntattttctaaggggtctcttcactttgatgagtgacatgaacaccgngtctccttctcttgngngtaccctaanccatatttccaancctgtggtactccaggattccangagtaagcctgtanaagagatttatttt

SEQ ID NO: 9155 - DNA, 510 bp, Homo sapiens
  unsure (417): n=A,T,C or G
  unsure (484): n=A,T,C or G
  unsure (485): n=A,T,C or G
  unsure (488): n=A,T,C or G
  unsure (500): n=A,T,C or G
cctactagacccctcttattaacctggggcaaacccatttggtaaaagatgactattgagtcttacccctacctgctccaggttagtacacaccaggcaacaggtggcattctaccctacccctttctggaggtggttctggacacctcaaaacctttgacatttgaattaacacgctaagacatctgcaaatgaacaatcagacaaagcattgctgggagttgggaattttggaaactctgttcacttaccaccaaatttattgaagccaccacggtcacttccgctggagaagacaagttagaagaaaggacatgaagcttccaacggctacaaaaggttgttttttgattttgtttaacattccccaaacatgggtaggtgtttttggaaaaagatacaagtggctactaaaanacatcccttcctgaccaccccttgtctgacctttgagcatgtcacacacacgtgtgcaatttctcannacncagtttataaanattttgcttt

SEQ ID NO: 9156 - DNA, 191 bp, Homo sapiens
  unsure (1): n=A,T,C or G
nggtctgaatcttcggtgattttctcgatgtcgctgttcttgcaggtcttctgcatggcctcctgcttgctgctttcaccattgctggtggatggcatctcatcactggcccatttagagaactcaggtgtgatgccgcgtgctgggagggccgccactggaggaaaggagggaggaaaaacaaagtgagg

SEQ ID NO: 9157 - DNA, 291 bp, Homo sapiens
  unsure (1): n=A,T,C or G
  unsure (92): n=A,T,C or G
  unsure (263): n=A,T,C or G
nggtaaaacaggagtgaagagagcagaaatctccaatgccatcgatcaatatgtgactggaaccattggcgaggatgaagatttgataaagnggaaggcactgtttgaggaagtccctgagttactcactgaggcagagaagaaggaatgggttgagaaactgactgaagtttctatcagctctgatgctttcttccctttccgagataacgtagacagagctaaaaggagtggcgtggccgtacattgcggctccctccggntctgctgctgacaaagttgtgattgagg

SEQ ID NO: 9158 - DNA, 643 bp, Homo sapiens
  unsure (373): n=A,T,C or G
  unsure (437): n=A,T,C or G
  unsure (475): n=A,T,C or G
  unsure (481): n=A,T,C or G
  unsure (521): n=A,T,C or G
  unsure (522): n=A,T,C or G
  unsure (532): n=A,T,C or G
  unsure (549): n=A,T,C or G
  unsure (565): n=A,T,C or G
  unsure (572): n=A,T,C or G
  unsure (594): n=A,T,C or G
  unsure (606): n=A,T,C or G
  unsure (618): n=A,T,C or G
  unsure (623): n=A,T,C or G
  unsure (642): n=A,T,C or G
aaatgatgccttgacttttgaattcaattctagaaccaattatcctaaactaaatcagagtattacaaatgaagatattccaacacaaagacttgtaggattttgtttagattgtcaatggttgattcatccaaattttcttcattgtcatccatggtgtgccagacttcagggaaaggagacggtatcagatgcagaactggaacacctcttcttaaaaatggaatatggtcatcctgaatcacacctccataactgtaattctggaaataccgcccctccaaagagtgatccttgagcaaacccaattcatgaagttcatgttcaattgcttgaagtctttcgaaccacctggctgagtttggaaaaaaantgggaaacgttgggtttggagctccaatcaaatccaataagaccaataaatccatgccatgcanttggctggtgcctctcgctccaggtgggtgcggggtcnatgccntctttcagctaagtgccagacccatagaggagaatcttgnncgagaccagngaacaaaagcctcttcnccctcaaagaagatcnacctggngtgaccaaatctggcttgggantctgaaacacgncctttaaggaanggaantttctttgtctaaggcacng

SEQ ID NO: 9159 - DNA, 318 bp, Homo sapiens
  unsure (4): n=A,T,C or G
  unsure (5): n=A,T,C or G
  unsure (24): n=A,T,C or G
  unsure (26): n=A,T,C or G
  unsure (32): n=A,T,C or G
  unsure (33): n=A,T,C or G
  unsure (53): n=A,T,C or G
  unsure (62): n=A,T,C or G
  unsure (64): n=A,T,C or G
  unsure (78): n=A,T,C or G
  unsure (87): n=A,T,C or G
  unsure (102): n=A,T,C or G
  unsure (153): n=A,T,C or G
  unsure (164): n=A,T,C or G
  unsure (185): n=A,T,C or G
  unsure (189): n=A,T,C or G
  unsure (197): n=A,T,C or G
  unsure (207): n=A,T,C or G
  unsure (212): n=A,T,C or G
  unsure (232): n=A,T,C or G
  unsure (241): n=A,T,C or G
  unsure (243): n=A,T,C or G
  unsure (257): n=A,T,C or G
  unsure (285): n=A,T,C or G
  unsure (289): n=A,T,C or G
gggnntgttctgggatagaaggcncnctgcannccaaaagggcaggaaggttncaatcctangncactgggacctttnctttctttntttcccaaaactccnggctggaacaaggaacttaaagttctcttttgccttgatggcttctcacanacatcttaaancacctgatgaaggatatgaanaganactacganatttagaaangaccnaggtcctctgataatatganccagttgtnangtaccttcagctgncgggcattccctctccacaggaacaggnggtntgatacaagggcaccacacggaggacctc

SEQ ID NO: 9160 - DNA, 591 bp, Homo sapiens
  unsure (1): n=A,T,C or G
  unsure (8): n=A,T,C or G
  unsure (534): n=A,T,C or G
  unsure (536): n=A,T,C or G
naaagtancaggtttaggttttgctacattctcaaaagacagcaggagtatttgacacatctgtgatggagtatacaacaatgcattttaagagcaaatgcaacaaaacaaatctggactatggataaataatttgagagctgccacccacaaatataaatacagtactcatgctgactgaaataataagacatctacaaatttataaacaaaaagtgattgtcattatcctgcttatgtactagattcaggcaagcattatagactttttggttgcggtggcttttgcatttatattatcaatgccttgcaggaacgttgcattgataggcccattttatttttttattttttttttcgagacaggatctcactctgtagcacaggctggattgcagtgcaatcctgcaattctcaatcttgcactgcagcctcgacctcccaggctccagtgactctcccacctcagcctcctaagtagctgggagtacaggccgcaccaccacgcctagctgatttttgtattttttttgnanagacggggggtttgggacctgccccgggcgggccaaggggcgaaattcccagcac

SEQ ID NO: 9161 - DNA, 161 bp, Homo sapiens
ctacctgcgctggccgaatctctgcttttaggagctcactcctcataggtagagttgacaataagcacacaaacaagtgagatagcagggcagccggaccacccagttgggcaattcgtggcttggcctaggaacgttacatttgactgaggctggcgagg

SEQ ID NO: 9162 - DNA, 587 bp, Homo sapiens
  unsure (1): n=A,T,C or G
  unsure (496): n=A,T,C or G
  unsure (515): n=A,T,C or G
nctgcaaataatcagaagccaaggccaggccatcgatttgacactgcaggcagatgaggtcttgggatgcctcttgcgttcccccttctgtgggagcaggtgccttcccaacctcagcactcagtcccaatctctcttccactctcctgggttcaaacaggaacctctctgttggcacgaagcttttgaggggagcaggtctaacaagaaggaaaaaggggggttattagcacggaagccccaccctgccaccaggttggctggggacagggaccaatccaccaggctcgggaggcttggggtggggcagggaagtcttcctccatccctcaaatttagggaaccactgggagccccagactcaggctgaaaatgtctttctgcaaatataaaactctttttaatgaatttgcctaatttctcagagaccctgggctggagaaccagtgcaatgtcacacgggagaggaaggactgtcctgtttattgggagggangagggggatgctggtgcancctgctcaggagtcacccagggtctgagggctgacttgcagctctgggccagaccttgcccggggcggccgg

SEQ ID NO: 9163 - DNA, 578 bp, Homo sapiens
  unsure (424): n=A,T,C or G
  unsure (445): n=A,T,C or G
ctggtggttaacaagtggatcgtcatgttcagtagtttatacattatgtgagaagtaacgttctgattctttttcttacacagaattggcagagggggtcgatttgggaggaaaggtgtggctataaactttgttactgaagaagacaagaggattcctcgtgacattgagactttctacaatactacagtggaggagatgcccatgaatgtggctgaccttatttaattcctgggatgagagttttggatgcagtgctcgctgttgctgaataggcgatcacaacgtgcattgtgcttctttctttgggaatatttgaatcttgtctcaatgctcataacggatcagaaatacagattttgatagcagagcgacgttagtcgtgagctcttgtgaggaaagtcattggctttatcctctttanagttagactgttggggtgggnataaaagatggggtctgtaaaatctttctttcttagaaatttatttcctagttctgtacaaatggttgtattagatgtctctatcatttaataatatacttgtgggactaaaagatataagtgcctgtataaa

SEQ ID NO: 9164 - DNA, 344 bp, Homo sapiens
aaaggagtgcttatttgcctaaatggctgttgacatacttaatagttttgtatctgattctagtatgctaaagcatttcagtattatgagaatacaatttacacactggatccccttgtacttattctttcagttgtcaaaatgttaccattattgctgggattctaagaaatctctacaaatgcctctgatgacatcagaaacaattggttctaatcctgtgaactctcttgtgaagaaagcatgagactccttcggtttagaagccatatctttcaggtcatccagaggtgcccaagccacaccaacagagaagatagtgattcctgcatcatgtgcagcag

SEQ ID NO: 9165 - DNA, 352 bp, Homo sapiens
  unsure (1): n=A,T,C or G
  unsure (256): n=A,T,C or G
ncctggcaccaggctgcctgtctttggttttacttccttgtcactttttcttaaaagaggtactgagtataaaacaatataaaacaatatgagagggtctctctctcttccctcatttcccccctttgagactctcagtttttattaggtgggagttctgagtcttatttttgctacttatgtctttttgtgcaatagattgatagtgatgtatatagtatgcttctgctaaagcattttggtgaactaaggtcgngacaaagttttttatcatttggagaaatacaggtatcagacaaaggagcagtaagcaggtttctattactattattactcttattataagagtttt

SEQ ID NO: 9166 - DNA, 511 bp, Homo sapiens
  unsure (1): n=A,T,C or G
  unsure (2): n=A,T,C or G
  unsure (214): n=A,T,C or G
  unsure (283): n=A,T,C or G
  unsure (395): n=A,T,C or G
  unsure (417): n=A,T,C or G
  unsure (458): n=A,T,C or G
  unsure (504): n=A,T,C or G
nnaaatcccagtttcagggaacaggactcaggtgggagccacgcctaaaagccttccacagagagagtgtggttaagcgcataggcgtcgctatcctcttcctccaaaagcagcttgtcgatggtcaacgagctggcggctcttctggggtcttccatgtcctgaaggactggctctgggatagagatggggagctggacaaactggggcccangtagggctggggccggaggctggtactgcagggtggaggtgggtagtgtggaaaggggctgaggccacnggaaataggtgaggggtgcccggtgctctgggccctccagcgggggccccactgcgggcgtggcggaccttcttgtctgtgacaggaaaacaccgtgacagagggttagcanccccaggagacccatccacccntccttgcccttagagggggcctccatctcccccttcaattntgcccttttctggtttctcacttcatggggcttcacctcctcctgnttaaaag

SEQ ID NO: 9167 - DNA, 371 bp, Homo sapiens
  unsure (8): n=A,T,C or G
  unsure (39): n=A,T,C or G
  unsure (51): n=A,T,C or G
  unsure (135): n=A,T,C or G
  unsure (176): n=A,T,C or G
  unsure (191): n=A,T,C or G
  unsure (203): n=A,T,C or G
  unsure (209): n=A,T,C or G
  unsure (210): n=A,T,C or G
  unsure (251): n=A,T,C or G
  unsure (254): n=A,T,C or G
  unsure (288): n=A,T,C or G
  unsure (302): n=A,T,C or G
  unsure (333): n=A,T,C or G
  unsure (342): n=A,T,C or G
  unsure (348): n=A,T,C or G
  unsure (367): n=A,T,C or G
aaggaccncgggaaggatatggaggcttcaggggacagngggaaggcagcncaggcttcaggggacagcgggacggaaacagaagattcagaggacagcgggaaggcaccagaggcccgagaggacagcgatcangaggtggcaacaaaagtaacagatcccaaaacaaaggccanaagcggagtttcagnaaagcatttggncaatanntagaaatagaagatttatatagcaaaaagagaatgatgttnggnaatatagaactgaacattatttttcatgcaaagntaaaagcacattgngcctccttttgaccacttgccaagtccctgnctctttcanacacanacaagcttcatttacctcngccg

SEQ ID NO: 9168 - DNA, 425 bp, Homo sapiens
  unsure (1): n=A,T,C or G
  unsure (133): n=A,T,C or G
naaacttctgtttgccagctctgtcttcagtaccaggcacttccttgggacttccttctttgtatgggggcctgataagccactccagacaaggggctgttctttatgacttgggaggaatcagcaattctanaaggagtcattgcctttggtgctttagtttgttctattacttcttttctaggacagagccacatattcagggaatctttatgcttctcagactcaggtttgggttccacaggcatcccatttttatcctttccttctttcttcagaagccacttatacagagcctccttctcacaattctcatcacacacacactctgcaaagcttgtgcagggctcattggctctgcacacctcctctaccttacatgggtcctgatggttctggacaagccaatcctctgtaacacctgc

SEQ ID NO: 9169 - DNA, 330 bp, Homo sapiens
aaaagaggtatgagggctgggcgtggtggcttatgtttgtaatcccagctacttgggaggctgaggttgcagccaagattgcgccactgcactacagcctgggcgacagagcaagactctcaaaaggaggcatgaaatgcacctcaatcttttgccccaagtctgccaaagattgtcaaaccctccctgttaaaaaaaaaatcaagtttacctactctcccttctatataaaggaccctaaaattaaaatgtcaatgcccaaaatgccgaagtgcagatcgtcttctctccaaataagagttacttggaatccttaacaaatccaaggga

SEQ ID NO: 9170 - DNA, 397 bp, Homo sapiens
  unsure (1): n=A,T,C or G
  unsure (2): n=A,T,C or G
  unsure (20): n=A,T,C or G
  unsure (305): n=A,T,C or G
nnaatgatgtgaaagcattngttccattcaaaggcccctatgcctttgaatgacatattctcagtaacttctttgccagtaactagagtatgtgagactgagtaactataatgtgcatatttcaagaattagcttcccgctgcattataacacatttcctaggaaagcctttgtatttttcatagccttttcacatatccctcatttaagaagtcacagtgttgcagttttactttgtttcagaggggaaggccatcttgttggcataagggggacagaagatataatatactctacactccggnctcttccctacaacctaaaagggagaggagttgaggccgatgggctaggactaggctttttggtaggcacattatagaagactgggtaaaga

SEQ ID NO: 9171 - DNA, 354 bp, Homo sapiens
  unsure (60): n=A,T,C or G
  unsure (333): n=A,T,C or G
ctgtttatccaagcttgagctcttgccaagatgtggtttgtgaattccgaactctgtggnctgctctgaaggagctgtcacagatgcctggggtgcttgcagcctgaaatcacacaggccctcccccagtaccaacctatctgcctcgccactgggcccctttcccctctcaggacaggggactaccaagcccaaggacaaagctcctatgtccagagttgacgactttgctgtctctccatcatcttcaacctgatctccgtcatcttcaacctgatctattctttcatcatccgatgcgacttcaggaatggaaggaaggcttaagttcanatcggccatgattggagattt

SEQ ID NO: 9172 - DNA, 271 bp, Homo sapiens
  unsure (1): n=A,T,C or G
  unsure (7): n=A,T,C or G
  unsure (11): n=A,T,C or G
ntgtggnttanctggctttgctggtcgtaatggaggacaaaagtgccttctggtgaaactcagcttccatagtgatggaacctaagggtagcagagtttatggtgaccctgtagtgtatctccagaaatggtgatcgtttgaatgcatgtaagacattccctagggactccaagaaatattgattacaggaagatgtggtgctttgaaagggacttggtgttcctacatgaaccaagtgaaggcctagaattggcaacattcagaacctcg

SEQ ID NO: 9173 - DNA, 342 bp, Homo sapiens
  unsure (1): n=A,T,C or G
naaagaaacagatttcagaattaaaaatcaaaaaccaacaattggatttggaaaatacagaacttagccaaaagaactctcaaaaccaggaaaaactgcaagaacttaatcaacgtctaacagaaatgctatgccagaaggaaaaagagccaggaaacagtgcattggaggaacgggaacaagagaagtttaatctgaaagaagaactggaacgttgtaaagtgcagtcctccactttagcgtcttctctggaggcggagctctctgaagttaaaatacagacccatattgtgcaacaggaaaaccacccttctcaaagatgaactggagaaaatgaaacag

SEQ ID NO: 9174 - DNA, 372 bp, Homo sapiens
  unsure (1): n=A,T,C or G
  unsure (161): n=A,T,C or G
  unsure (163): n=A,T,C or G
  unsure (301): n=A,T,C or G
  unsure (319): n=A,T,C or G
naaaagtttccctagcgggccattccttagcaaaatgttggaatccctgttgctacattgactaaaaggtcatgatgaatggaatatgtaagacttggctcatagaaacctaatcagatggttagaggtgttggcagtttaggacctgctgtcataaatgngngaacaaccttttgtaacctaacctattgacctgcatgttttttctttaccccaattcattacatggaggctcaatcttgagtttgctttactggttcagcaaaagccaggaagaacaactttgtagtaatcaaaatgntatccaactgtatattgnttactttattgtaaatactgaacagtggttaataaatagttatatatttcttt

SEQ ID NO: 9175 - DNA, 354 bp, Homo sapiens
ctgaggcagacacccctttccggatctgaaacccagggcagcgctggatggagtcagtgtgccccactgcccccctgctcaccagcagtgcagcagggaccaggtcagtctaatcatcttaagccccgaattcagcacagagcccagaaccccctggggctcagaacctactggctaagatggacacgccttccccaggcttacccggtaaaggccagcagggacgtgcactgaatagatggcgtcgtcctctagctcagtgctgtggaaaggctgcagccgcgtagtgagctcgtccccaggggggcccccaaagggcttcagggcaagagccaggttcatacatggaaaagg

SEQ ID NO: 9176 - DNA, 338 bp, Homo sapiens
aaaagaaataaccatttgtttcagattaaattgaccattctatttttcagtcagcattctcaccaccaaatggcacctatcccctttaccctgtgttccttttgctttttgccgtaactcttattgtcctccaataaactgtgtaatctatcatatccatctccccttgctagaatataagctccatgagggtgggataatttggttttttgctcaataacaattgtcccatttatgtctttatcttttaagactattcatcttcaaataagacataaataaggttttattatagcaatatgctataatttttaagtgacaactcaagcacttgtttt

SEQ ID NO: 9177 - DNA, 461 bp, Homo sapiens
  unsure (130): n=A,T,C or G
  unsure (216): n=A,T,C or G
  unsure (246): n=A,T,C or G
  unsure (251): n=A,T,C or G
  unsure (252): n=A,T,C or G
  unsure (284): n=A,T,C or G
  unsure (371): n=A,T,C or G
  unsure (375): n=A,T,C or G
  unsure (403): n=A,T,C or G
  unsure (435): n=A,T,C or G
  unsure (443): n=A,T,C or G
  unsure (446): n=A,T,C or G
tgcaaatccatgtctaaggtgcatggttgtgttcacttaacaattacgcaccttgactgtccaaatgtgagagtcttatggagtgggcactccctgctggaagggaaaggtgagactgaggtatgtgganaggaccctccttttctagtgcataggatcccagacgattataatcacacacaacatgccaagaaaaggggactgcgttatcagcancccttctgtatactgcaaatggagggtganaaggnngaactttgtttaattaggatgaaccatgtggngattacatacattaatgtccaagggacattgttgtggtcaattaaaaccatgtactttggacaaatataagaatcttaaaaagtagngggnactccttgttgaaaaagcaaaagggagnccatgagaaggtgcccttatctagtacacaangaatatanacnagccaagcaaagagg

SEQ ID NO: 9178 - DNA, 357 bp, Homo sapiens
  unsure (10): n=A,T,C or G
  unsure (200): n=A,T,C or G
aaaagcttgncagagttgcacaaatctaactggtattttgtttttgtttttaggaggagatgttaaggtaacccatcttgcaggacgacattgaagattggtcttctgttgatctaagatgattattttgtaaaagactttctagtgtacaagacaccattgtgtccaactgtatatagctgccaattagttttctttgnttttactttgtcctttgctatctgtgttatgactcaatgtggatttgtttatacacattttatttgtatcatttcatgttaaacctcaaataaatgcttccttatgtgattgcttttctgcgtcaggtactacatagctctgtaaaaaatgtaattt

SEQ ID NO: 9179 - DNA, 435 bp, Homo sapiens
  unsure (1): n=A,T,C or G
nctgaggaatgacgcaggggcctgcaggcagctcacgcggagacaggtctgtggggccccgcgtcagaacccacttcacatcccaaagccccacctgctttgatcttcaatgctgggctcaatgtcagatctggctgaccagaggggctcaatgaggctcactggctcttcatgcaccctgctgtggcctgagcacgtccccccaaaacccacctgcttaagtcctcacctgcaaggggatggtattaggtggggcatttgggaggtcatccggtcacagggcaggggcacagcctcatcatgggaccatcaccctcacaaaagaggttgcatctactggtgctttcatcttgggcttccagcctccaaaactgaaactgatttctgttgtttataagccactaggtttacaatattttcttttttttttttgaa

SEQ ID NO: 9180 - DNA, 218 bp, Homo sapiens
  unsure (57): n=A,T,C or G
  unsure (103): n=A,T,C or G
  unsure (122): n=A,T,C or G
  unsure (157): n=A,T,C or G
  unsure (177): n=A,T,C or G
  unsure (214): n=A,T,C or G
ccaaagtgggcagattgcttgcgctctggagctcgagaccagcctgggcaacatggngaaaccctgtctctaccaaggatgcaaaaaaaaagctgggcatggngggtgcatgcttgtcccanctactgaggaggctgaggtgggaggatcccttgancctgggaggtggagggtgcngtgagctgaaatggcaccactgcaatccaaggggggngaca

SEQ ID NO: 9181 - DNA, 157 bp, Homo sapiens
  unsure (24): n=A,T,C or G
  unsure (42): n=A,T,C or G
  unsure (48): n=A,T,C or G
  unsure (58): n=A,T,C or G
  unsure (64): n=A,T,C or G
  unsure (68): n=A,T,C or G
  unsure (88): n=A,T,C or G
  unsure (90): n=A,T,C or G
  unsure (102): n=A,T,C or G
  unsure (115): n=A,T,C or G
  unsure (120): n=A,T,C or G
  unsure (124): n=A,T,C or G
  unsure (125): n=A,T,C or G
  unsure (141): n=A,T,C or G
  unsure (142): n=A,T,C or G
caacctttttcgcgtacctggggnggaaactgctggcccaancaaatnactttgagcnatactnatgnagagggaccatcttaagggntntactgtcctgcnctaagacatggangggancagnngggccatcatcaaagnnttttactccatcttg

SEQ ID NO: 9182 - DNA, 167 bp, Homo sapiens
  unsure (39): n=A,T,C or G
  unsure (45): n=A,T,C or G
  unsure (52): n=A,T,C or G
  unsure (59): n=A,T,C or G
  unsure (84): n=A,T,C or G
  unsure (100): n=A,T,C or G
  unsure (110): n=A,T,C or G
  unsure (162): n=A,T,C or G
  unsure (163): n=A,T,C or G
aaaaacaaactacataaacagatctttcctataacctangaaagnggaatgncagaagncaacaaaatgtgataaacttaaagngctaaaacagaaggcncttcacaaantctgttcactgaaacagttatatatcctcgcttacatccttcactttacaannggca

SEQ ID NO: 9183 - DNA, 224 bp, Homo sapiens
aaaatttatcagtatagcatttcatttctatgcatgtatatgtatagtaattcataaaactaaatagcaaactgatattctacaccagttcatttatctcaatatatattttggaatataacggcaatattaaaaatatcaattccctctaagctgataatactataagattttacacaaagttaaagtttttgttttttctttttgaaaaagtttcattgttt

SEQ ID NO: 9184 - DNA, 345 bp, Homo sapiens
  unsure (1): n=A,T,C or G
  unsure (31): n=A,T,C or G
  unsure (36): n=A,T,C or G
  unsure (39): n=A,T,C or G
  unsure (58): n=A,T,C or G
  unsure (64): n=A,T,C or G
  unsure (69): n=A,T,C or G
  unsure (153): n=A,T,C or G
  unsure (186): n=A,T,C or G
  unsure (241): n=A,T,C or G
  unsure (250): n=A,T,C or G
  unsure (251): n=A,T,C or G
  unsure (293): n=A,T,C or G
  unsure (317): n=A,T,C or G
  unsure (319): n=A,T,C or G
  unsure (335): n=A,T,C or G
naaaaatatgtactgtttccttttttgttgnttttntgnctgttattttttcttttgncctganctcancatagactaatactaccttaatgttaaaatctgaatttcttttaccattttgcttaaaagcaatatgctatttgcttattccgngccctgacatagataatttttgaattctgatanaatacaagtgtggtaaatgccatgtttgtactttatctaacatcttctctttcancaggcttgnnttttttatatcatgagattgtttgtgtgtcccctttcctctnctttgcttaacacaattatcttgngntgaaggatcctccacnatttcatgga

SEQ ID NO: 9185 - DNA, 306 bp, Homo sapiens
  unsure (149): n=A,T,C or G
  unsure (255): n=A,T,C or G
  unsure (267): n=A,T,C or G
  unsure (270): n=A,T,C or G
  unsure (272): n=A,T,C or G
  unsure (288): n=A,T,C or G
aaactaagcaaaggtacacgttgtaacggtggggcatctgtgaaaaagatgtccctttcataatatatgcaatatattccagatgttttgagagattacagaagaggaggcctgcttcacttgcagataagtttattataattctccanaaatgtgcaggatgtgcattagcaaattgcactgtacttttcactccagcctgggtgacagagcaagactcccgtctcgggggcttaaaaaaaaaaaaatgctgtntctaaatgaatntgngnaattgggcccaaatgngggtttgctcagtattag

SEQ ID NO: 9186 - DNA, 189 bp, Homo sapiens
  unsure (126): n=A,T,C or G
  unsure (164): n=A,T,C or G
ggaaagtgtaaatttatttaataccaaatgtttcctaagtttactttttgcacaatgcacagacacttttgggacaatgtatggttaaaaactaatattctaccaacagctccatgctgctctagnatcatcctgaagggacaaaagtaatggcagaaggatgnctggggtctccaaagtcccaggaac

SEQ ID NO: 9187 - DNA, 257 bp, Homo sapiens
  unsure (55): n=A,T,C or G
  unsure (75): n=A,T,C or G
  unsure (142): n=A,T,C or G
  unsure (207): n=A,T,C or G
  unsure (234): n=A,T,C or G
ctgagaattaactactgacagtatccagcacttctggaacacgcggtacagcctntttggctaatagttctgcanaattgaagtctggctcataagtgacactcttagaggagctgcaggaacagctacaggtttctgtganatcattaaaatctccaagctctaaaataacaaattcatcaacatcgcatttgcagaatctctttnacatcatggcaaggacgtgtttcagtnactgggctgacctgtaacacagc

SEQ ID NO: 9188 - DNA, 295 bp, Homo sapiens
  unsure (126): n=A,T,C or G
ctgcacgggggaggtgaagcagaaactcgctgagcctcaaggaatgtgaaactagcaagtacagataaggctcaaatgtattacatgaatcattatcaatctgtcttgcaggaagacctaggtagngaagatgaaagtgagaactcccactaataagtgagattctcaaaggggggaatgaggaaggagaccacctctcttattgtttcatacctcagaaaaagaaggaagaaataaaagttaaagaaggcaaaaatgagataaatagtcaggcagcctggccccgcaccccagg

SEQ ID NO: 9189 - DNA, 225 bp, Homo sapiens
  unsure (1): n=A,T,C or G
  unsure (133): n=A,T,C or G
  unsure (197): n=A,T,C or G
  unsure (203): n=A,T,C or G
nggtaaaatcatttatataaagtcattaggatcatttaggaaagagaggatggaaactaacatttattaaaaactaactataccaggtaccttattacattattttatttaatcatcatgtatccctataagnaagtattcttctcttttatagcagtaaggaaatctgagcatgtcaggcaatatctaatgttgcnccaggnatcatccgcaagctgggcaatg

SEQ ID NO: 9190 - DNA, 373 bp, Homo sapiens
  unsure (13): n=A,T,C or G
  unsure (19): n=A,T,C or G
  unsure (123): n=A,T,C or G
  unsure (124): n=A,T,C or G
  unsure (135): n=A,T,C or G
  unsure (144): n=A,T,C or G
  unsure (148): n=A,T,C or G
  unsure (248): n=A,T,C or G
  unsure (328): n=A,T,C or G
  unsure (340): n=A,T,C or G
  unsure (345): n=A,T,C or G
  unsure (350): n=A,T,C or G
aaataaaattacnagctgnaaggaaaatgaaaagccacaaatgcaagactgttcttaaatggaaggcatagtcagcgagggtaaatcctataccactttaggaagtattaaaaatatttttannatttgaaatanatttcatanaagncctctattcaaaatcatattccacagatgttccccttcaaagggaaaacatttggggttctaaacagttatgaaagtaagtgatttttacatgattccanaataacacttgtattgaccaatttagacagataccacgaccaattttgcatttaagaaattgttctgattatttacgtcnactcattagaantcagngaaangtcacagtcttttgtcacagaga

SEQ ID NO: 9191 - DNA, 271 bp, Homo sapiens
aaacaaataaaaggtcttggggaattctgtttggctacctgggcacgccagtctgcaccatgtgtccctgcggcgcatgagtgactggcgtatttagcccgtcacatttcattcgctgaaggaaaggcaagagagttgaaacatttttcttacttaaaaaaaatgatctttgtgaagaacatagtgagttcgtttgtcttcagtcaacagcggctgaaactgaccactgagaaatgggtgtgggcactgacagttctcccccattatttgg

SEQ ID NO: 9192 - DNA, 477 bp, Homo sapiens
  unsure (344): n=A,T,C or G
  unsure (374): n=A,T,C or G
  unsure (401): n=A,T,C or G
  unsure (421): n=A,T,C or G
  unsure (440): n=A,T,C or G
  unsure (454): n=A,T,C or G
  unsure (464): n=A,T,C or G
  unsure (475): n=A,T,C or G
aaagtgatcaggttcattttattgactacacagaagcaattccattttccactaacaaaataatttaggatgaagaattctgactcagtgtctccacaggaacctgttcctcagctttctggatgtcattgtttctgacatcacaccttcctagacaggtatttctggaaaaggatctggtaagaggatgaatttggctctaaacaaatgcccatggccccggaagacctgttggggccaccgagttagtttctctggcaaaatttgattccttccatctcaccactatagtaactgttgttgttatgttaccaggagccacacaaaggttgacccatcaaggnggagccaccgttaccaggagccacacgaangcttgaaccagcaaagtggaggaccanacctgcccgggccggcgcgntcaagggccgaaattccangcacactggcgggncgttactagnggatcccgagntc

SEQ ID NO: 9193 - DNA, 262 bp, Homo sapiens
  unsure (176): n=A,T,C or G
  unsure (190): n=A,T,C or G
  unsure (198): n=A,T,C or G
  unsure (209): n=A,T,C or G
  unsure (222): n=A,T,C or G
  unsure (246): n=A,T,C or G
  unsure (260): n=A,T,C or G
ggggaaatggcattcttggcaaagagaacagcatgtgcagaccaggagcaggagcaaggaggggctgacagatggtggcactagggacgttggcagggtcagactgtgccagccttgaaggccaggggagaccctgggactgtggcgtggtcatgggaaaccaccactgacagttntggagcaagggcangatttggntttaggaaacncactttctctggnaagacctacaggtttaacggtccntccttcctcattgnaa

SEQ ID NO: 9194 - DNA, 146 bp, Homo sapiens
  unsure (2): n=A,T,C or G
  unsure (15): n=A,T,C or G
  unsure (24): n=A,T,C or G
  unsure (56): n=A,T,C or G
  unsure (72): n=A,T,C or G
  unsure (75): n=A,T,C or G
  unsure (79): n=A,T,C or G
  unsure (83): n=A,T,C or G
  unsure (96): n=A,T,C or G
  unsure (101): n=A,T,C or G
  unsure (113): n=A,T,C or G
  unsure (115): n=A,T,C or G
  unsure (117): n=A,T,C or G
  unsure (145): n=A,T,C or G
gnaacacccaacagnaacctctgntgttactctttgactaaaataattattttagntaaaaaaaaaaaaaanaanaaanaaanaaaccaggtaacnctatncaaaaggaagcngngnaagatctgaaacaaaattttctcttttnc

SEQ ID NO: 9195 - DNA, 347 bp, Homo sapiens
  unsure (1): n=A,T,C or G
nggtctggtctccctccaccctctcatatttacacccaaccccttccccaaagctagcttttaccaaagttcctggtaggaggtcaagaagtgtgtccacttagccagcagtcctagatgtagtggacgctgtttgtccccaggccagttgggcaccaggaggggctactctggggattcagggcatagacttcgtactggggtcaagggaggcccccactcacagatactctcctttccttctggggctcaatgtacaccaaaaccttcagaaagcaaagttggagtggtggacccccaatgtcaagtttagtgctctctttgcttgtgaggacccacacaagtgg

SEQ ID NO: 9196 - DNA, 364 bp, Homo sapiens
  unsure (1): n=A,T,C or G
  unsure (5): n=A,T,C or G
  unsure (302): n=A,T,C or G
  unsure (336): n=A,T,C or G
  unsure (341): n=A,T,C or G
ntgancgtgaagcacaccccgaagttggagatcaaggtcactcccagtgatgccatagtgagggagggggactctgtgaccatgacctgcgaggtcagcagcagcaacccggagtacacgacggtatcctggctcaaggatgggacctcgctgaagaagcagaatacattcacgctaaacctgcgcgaagtgaccaaggaccagagtgggaagtactgctgtcaggtctccaatgacgtgggcccgggaaggtcggaagaagtgttcctgcaagtgcagtatgccccggaaccttccacggntcagatcctccactcaccggctgtggagggaagncaagncgagtttctttgcatgtcactgg

SEQ ID NO: 9197 - DNA, 373 bp, Homo sapiens
  unsure (6): n=A,T,C or G
ctgtancttctgtgggacttccactgctcaggcgtcaggctcagatagctgctggccgcgtacttgttgttgctttgtttggagggtgtggtggtctccactcccgccttgacggggctgctatctgccttccaggccactgtcacggctcccgggtagaagtcacttatgagacacaccagtgtggccttgttggcttgaagctcctcagaggagggcgggaacagagtgaccgagggggcagccttgggctgacctaggacggccagtttggtccctccgccgaagacgacatggtcattattacgatcccacacttgacagtaatagttggcctcatcgccggcttcgaccctgttgatggtcagggtgg

SEQ ID NO: 9198 - DNA, 364 bp, Homo sapiens
aaggcccttttctccaaaaaattcattccactttcatcttctgaatcggagttggaatcagtcacagaattctctgagggctggcgggactctgcttttttgttggttgctcccctggtactccgcgctggaaacttcatcgccaccctgagaggtccagagtgcctgcactggctgcgggtcctacagccttcccgaactgactgcagcctcgtgtttgcaaaattatcagaagcaaagctgtcacaactgtcatcagaggatgacgaggtttccatggaaatcaacttcacatatctgaatttctttaagttcttctttactctgagatctttctgcggcacgcggcgagcgtccatgctgg

SEQ ID NO: 9199 - DNA, 273 bp, Homo sapiens
aaaaatctctctcgtgggtaaagtcactttccccttggcatctgacttcagcaccatctgggccctacagaaactgaggccagtggaggaaatggctctggacaaagggctgctgcttggatgtggccccagcgatggtcagtctgagatcgacactcctagagtccaccaatctctctctggaggcttctgaggttgatccccatactccccacaccaggtctacaactccataataatggctaaaaattatttcttatttatttgaaattt

SEQ ID NO: 9200 - DNA, 126 bp, Homo sapiens
  unsure (34): n=A,T,C or G
  unsure (36): n=A,T,C or G
  unsure (44): n=A,T,C or G
  unsure (48): n=A,T,C or G
  unsure (59): n=A,T,C or G
  unsure (78): n=A,T,C or G
  unsure (92): n=A,T,C or G
  unsure (98): n=A,T,C or G
  unsure (106): n=A,T,C or G
  unsure (112): n=A,T,C or G
ctgtagcttctgtgggacttccactgctcaggcntnaggctcanatanctgctggccgngtacttgttgttgctttgnttggagggtgtggnggtctncactcccnccttgncggggctgctatct

SEQ ID NO: 9201 - DNA, 415 bp, Homo sapiens
cctcatccggctttgacccaccatccgttgcagaagcctccaggagcagcaatcctaagagtgggaggcagccaagacccccttccttcaaaacctcccggaagtggtttcaggccctctagttgccatgaccaatttgtgtgtgtgtttaatttttgcttcaagctctgtagcaggacctgccccacgcacacccctacccctctgtgaggagctgtgggaagtgtgggtttgtctccagaacagaagagaatgatggatattctggctctggggccctctccaccaccactcacagtagccttgctgaagccatcacagatgggagaaggccatgccagccacgtccgccgaggggcgccagcctgaagctgccaggccctgaggttcagaccctggaccccatagctggagg

SEQ ID NO: 9202 - DNA, 371 bp, Homo sapiens
cctccttgaggatgaggctgattatgtggtccccgtggaagataatgatgaaaactatattcatcccacagaaagcagttcacctccacctgaaaaaggtaagagtttgtcgccttaagcacctgaaaatttttagcagttgatcaggatgtataagagtatttggtagtaagcactaagaggctcagaaatgacagtgcccaggactttctcccctgggccacagtgtgtgcttctttggctggttgggcagacagcatcagtgacaacccatctctgtgtatcatagcccttccctgccttccccttcctcttccatgctttaatcttcccatctcacattatgaaagcacctgggtagttctcttcag

SEQ ID NO: 9203 - DNA, 360 bp, Homo sapiens
ctgatgtcacagtgcagacatccaccgttccaccacagaaccagtggctgagcggaccaacgttgccatgtgcgtttgctctgtggggaacagagcacagagggtgagcgacatgtgcagaacggccccttggctgcagttaggacctcagtggctggtatggccgagctgctagaagatgctgctgtccctgtgatcccagcagccctcccttcaccgtgacccctgacctttgtcaggaaggtgcagtttttcttctcaatctaaatgcctttcaggtgggccgcttccttggctacctggttccagggggctgttttgtaatgagatgctgctggcaggccactcagaggctcccag

SEQ ID NO: 9204 - DNA, 606 bp, Homo sapiens
  unsure (191): n=A,T,C or G
  unsure (524): n=A,T,C or G
  unsure (590): n=A,T,C or G
  unsure (599): n=A,T,C or G
aaattttgagacagtataaggaaaatctggttggtgtcttacaagtgagctgacaccattttttattctgtgtatttagaatgaagtcttgaaaaaaactttataaagacatctttaatcattgcaaaaaaaaaaaaaaaaaaaaaaaaaaaacctgcctgggcggccgcccgggcaggtccttgcctcanatccaaggtcactcggaagaggccatgcctaccctcaatgacactcatggaggaaatgctgagagaagcattcagatgcatgacacaaggtaagactgccaaaaatcttgttcttgctctcctcattttgttatttgttttatttttaggagttttgagagcaaaatgacaacacccagaaattcagtaaatgggactttcccggcagagccaatgaaaggccctattgctatgcaatctggtccaaaaccactcttcaggaggatgtcttcactggtgggccccacgcaaagcttcttcatgagggaatctaagactttgggggctgtccanattatgaatgggctcttccacattgccctggggggtcttctgatgatcccagcagggatctatgcncccatctgngtgactg

SEQ ID NO: 9205 - DNA, 216 bp, Homo sapiens; identical to SEQ ID NO: 3766

SEQ ID NO: 9206 - DNA, 367 bp, Homo sapiens; identical to SEQ ID NO: 144

SEQ ID NO: 9207 - DNA, 408 bp, Homo sapiens
aaattggaaaattgaaatcccaagtgggcaagcaagggctccagcctagcactcccttttctctcccacatagcatgagggagagtggaaaggtaggagtgggtgggaaagtgttgcacccagcctttccactccaaacctcgtattgctttcttgaggttggtggtgaccaggatgtatcattttaggtcatgtccaaagtaatggagatgttccagcctagtgcggtggtcttacagtgtggctcagactccctatctggggatcggttaggttgcttcaatctaactatcaaaggacacgccaagtgtgtggaatttgtcaagagctttaacctgcctatgctgatgctgggaggcggtggttacaccattcgtaacgttgcccggtgctggacatatgagacag

SEQ ID NO: 9208 - DNA, 248 bp, Homo sapiens
ccaaagaagcagcggcttgggccttcacccagtgggcccttctctgtgatatagtcaaagagatcctgggcgggcaaaggccgctcgaggaccagcatgaagccctcctgtgtctcaaaccagtcaagcaggcggatcacgccagggtgcccaccacctgcacccactttccatagcagtgcgacttcgagtgggcatgtgactgagtctgacaagggggaccagcccagcacacgattccggggaat

SEQ ID NO: 9209 - DNA, 90 bp, Homo sapiens; identical to SEQ ID NO: 145
  unsure (8): n=A,T,C or G
  unsure (53): n=A,T,C or G
  unsure (54): n=A,T,C or G
  unsure (85): n=A,T,C or G
  unsure (86): n=A,T,C or G

SEQ ID NO: 9210 - DNA, 343 bp, Homo sapiens
  unsure (243): n=A,T,C or G
ctgtggatcctgattctggactggaacactctgcgcatgtcctggagaaaggtgggaaggtcttcagtgccacccttggcctggtggacatcgttaaaggaaccaactcctactacaagctgcagcttctggaggacgacaaggaaaacaggtattggatattcaggtcctggggccgtgtgggtacggtgatcggtagcaacaaactggaacagatgccgtccaaggaggatgccattgagnacttcatgaaattatatgaagaaaaaaccgggaacgcttggcactccaaaaatttcacgaagtatcccaaaaagttctaccccctggagattgactatgg

SEQ ID NO: 9211 - DNA, 291 bp, Homo sapiens; identical to SEQ ID NO: 146

SEQ ID NO: 9212 - DNA, 197 bp, Homo sapiens
ccattggttcccatgacaacgtgatctacatctatggtgtttccagtgatggtgccaaatccagccgctttggccgctgtatgggtcactccagcttcatcactcatcttgactggtccaaggatgggaatttcatcatgtccaattctggggactatgagattctttactgggacgtggctggaggctgcaagcag

SEQ ID NO: 9213 - DNA, 244 bp, Homo sapiens; identical to SEQ ID NO: 147

SEQ ID NO: 9214 - DNA, 91 bp, Homo sapiens
ccagtgaggaccggaggagccctgggggccagggagaccacggtcgcccttctcaccctgttcacccggaggaccgatgagcccgatcagg

SEQ ID NO: 9215 - DNA, 157 bp, Homo sapiens
ccacgctgctggcctgggctggcgtctcctgctgtgagctggctgaggaggacttcctggcggtctcccccttagatccgcgctatcgtgaggtccactatgtcctgctggatccttcctgcagtggctcgggtgagatggtatgccgagcagacag

SEQ ID NO: 9216 - DNA, 406 bp, Homo sapiens
cctctaaccttgagagtgtcattgccttgttacatagcatgatgtcttaccccagaagaaaaacagggaaatatagaaactcctaccctcccacatgcacagatttctgggtgatgcctccccaaggagtagagatagaagaagcagcaaagacaagggcagagacccagcaccactatgccacacacttgatgtcagataccaccaggaaagggaaaaatcacattccaaattacaaaggaaatggaaagatggaagaccgaagacacagattttgctgcagcaattccttggaacgtgagagcactctcttcgaaacctcttctctcattctctttggaagcccaaactgggttcttgagtttggggaagatttatggaacagatgatgcctaccattgccttt

SEQ ID NO: 9217 - DNA, 166 bp, Homo sapiens
cctggacgaggaaggctcctgacactcactaggactgtgactagatgttccagtggcagaaagtcctcctggtttccttcgggccctggcgtaatgcagcagagcagcagcagcagcaaggacgaggatgctgagcaccagccccgtgattcccgcagcggtaagg

SEQ ID NO: 9218 - DNA, 126 bp, Homo sapiens
cctcctcctttcgctcctgaagtcagaagcgccagcctttggctctcaaaattgggagcgatttggtggagaggatggggtagggaggatgggagaacagcgcctttatctgggacagacagaagg

SEQ ID NO: 9219 - DNA, 322 bp, Homo sapiens
  unsure (182): n=A,T,C or G
gatcgcgccaccacactccagcctgggcgacagagcgagactccatctcaaaaaaaaaaaaaaaatactgagtagcaaattcttaattccaagtaaagattaacacctttctattaaaaaaaaaaaaagatgaggagagaataaactatttcctattattattctagctgggtacacaggcntgcacttgtagtcccagttactgaggaggttgaagggggaggattgcttgagtctcggaagtcaaggctacagtgagctgtgatcatgtcactatactccagcctgggtgaaagagtgagatactgtctccaaaaaaaac

SEQ ID NO: 9220 - DNA, 291 bp, Homo sapiens
ccttcacaacctacgaaactacagtccagatttgggaaagcagccgaaaaaggtgcctaaacgtcgccaggccgcccgagagctgtccattcagcgccgttctgccctcaatgtgaggctcttcctcagagacttctgctctgagttcctggagaactgttacaaccggctcatgggatcagtagaggatcacctgcttcgggagaaagctcagcagcatgatgagacctattatatgtgggccttggctttcttcatggccttcaaccgagctgcctccttccggccagg

SEQ ID NO: 9221 - DNA, 340 bp, Homo sapiens
ctgccagactattcccacagtgctccaaatgcacatgaacaacagtgacggctccagccttcgacccagagccccgtgcccagtgcgtcagtgggcctggggttccaggctacatcaagcactgatggtgtcagggctggtagttaccaaatcagggttaagaaacatcagggccacatttcactaccttcacagatcaaactcagcagcagtcatgactgtctgtcactacactggggatcccaattccacataagcacttttggaagaaaacagccaaagttggcctaaaattggcgctggaatttgggctgggaaaaatcttgtggttatttccttt

SEQ ID NO: 9222 - DNA, 205 bp, Homo sapiens
  unsure (64): n=A,T,C or G
  unsure (188): n=A,T,C or G
  unsure (190): n=A,T,C or G
  unsure (192): n=A,T,C or G
ctgatgcctcactactagatgcagtgctgggaccttcctcttttggagctgtcccatgtacagnggacccaagctcaggaccttcgtggagctgcttctccaacctgagaaactcaagacccatcctcccgctgtcactttggacaatggaaatctacattttcttttcccttttttttttttttganananagtctcgccctgt

SEQ ID NO: 9223 - DNA, 221 bp, Homo sapiens
ctggacttgtttgacgatgttggtactttcgcctctggacccccaaagtacaaggacaatcccttttccttaggggaaagctttggctcccgctgggatacagatgctgcctggggtatggacagggtagaggagaaggagccagaagtgaccatctcaagcatccggcctatttcagaaagagccacaaaccggagggaagtggagagccggagctcagg

SEQ ID NO: 9224 - DNA, 473 bp, Homo sapiens
ctgcagagcccaccccaggaggagcctgcctctccttacaaaggctgtaataagacagcacttgacgatgccatacgtgcgaaaagtgcagagcctcagagggtttacaacccccatccctttgtaactgtagtttgcttacactgtggattctaaagagacatgtaaatctggggccgatttcatctgtttaatgattactccccacccgatagagctattctatactgttgctaaaatttcattaagtctctcaagatgcattgatgagatgagacaccatgaataacacattcatcaactcaagtatggcaactgttcagagagcttcagagctttggtacccgagtgcagacttggtaattaccgggaatttgtctcccccgtataaattctggcgaacaacgagaaaacaccatctgtgatcgtttccacatcacgtttgctaacagagcacttctggagagcaatgg

SEQ ID NO: 9225 - DNA, 252 bp, Homo sapiens; identical to SEQ ID NO: 2678

SEQ ID NO: 9226 - DNA, 360 bp, Homo sapiens
ccttcggtccaattcaggccaccctctgttttcttggctcttgaggcttttgttggtttcaggcctgaggcttctatctatcttggaacatgggctttccatcttagtcctcgggtctcaagtctcaaaccatctgtcttatactttgggcctcctatccatatgagccttccaccttctgccctacttgagttctgggttttactgcagtctagggccttgttttggtcttggatcatctcacatggcagcctggcataaggaaccgctccacaatgcttgctctgatagccgacgttctgcacctatcaggcaggggttaggaagcccctctgccacacatgacacacacacacgtac

SEQ ID NO: 9227 - DNA, 302 bp, Homo sapiens
  unsure (193): n=A,T,C or G
ctccaacccttggaataatccgagtgctccatcttcagtgccatctggactcccaccaagtgcaacaccctccactgtgccttttggaccagcaccaacaggaatgtatccctccgtgcctcccaccggaccacctccaggacccccagcaccctttcctccttccggaccatcatgtcccccacctggtggnccttatccagccccaactgtgccgggccctggccccacagggccatatcctacaccaaatatgccctttccagagctacccagaccatatggtgcacccacagatccag

SEQ ID NO: 9228 - DNA, 311 bp, Homo sapiens
ctgaatatggaagagatctttttttactagagatctgcagaagaaacgcaatcttctgagcacaatatggaatctaaaggttttatcacttagttgttcatattatgaacctaaaaataatggcataaagtttggggatgccaggcatactttttcatgtttggtgttgagttattttacttttctaacccaacattccttggtgagaccattaaatccaaacacttgtcaccgttccttctcatagtcactctgggtcatcagcatgtcccagtcactgcagcaacgccttgtgtttgtttcattttttt

SEQ ID NO: 9229 - DNA, 228 bp, Homo sapiens; identical to SEQ ID NO: 329

SEQ ID NO: 9230 - DNA, 377 bp, Homo sapiens
aaaacaagcaaattttattaaaggaaaattttgcaggtttaaggtttgcaggtgaaattttgtaggtgaaaaggtttacttttcaccagtctgttctggcatgcttctaatgatgtcagagtcacctggatcaatgatagccagtgtgcacactctgtagtattttccgcatgctgtgcccagttcaatattattgccactgtagtgatggacaccagttttagccaacatagcatagtactctatttcagatttcctcaaagctgggcagttgttagcgagaatgaccaatttcgctttgccttgtctgatcatcttcagagtctgcttgtaccccaggacgtacttcccacttttcataacgagttggagcctag

SEQ ID NO: 9231 - DNA, 162 bp, Homo sapiens
  unsure (9): n=A,T,C or G
  unsure (75): n=A,T,C or G
  unsure (77): n=A,T,C or G
  unsure (93): n=A,T,C or G
  unsure (95): n=A,T,C or G
  unsure (155): n=A,T,C or G
ctgggaacncacatgctatgtatgtcaccatgtgatcacaaccacagcacatgtgaagtgctacaattactcctnanagcggtggaatggcanangagcttgcatgaaaaatcagaacatacccgtacaccaaagcaattcaaaaggaccaagtnaccctca

SEQ ID NO: 9232 - DNA, 433 bp, Homo sapiens
cctggaagctcctacccaaccctcatttgtttcaactcactttcaatatgtgcatagttttataaagcagacatttccatgaggaaaagaggatggtggtgaaaggggaggggtgaagggacatctccaagtcacagaggctgcaaaactcagcatgacttgtggacggagccacaggccacccagggcaacaacacccacataactcaccaagtggttaacggctctaaaccagggtcaacaggagaggggacaaaagtcactccttgattttgctgcagcttaaagataagttctacctcagcttatgctagcccttatggggcaaaaaagggaaagtcattctccccaagtccaggctgggccgtcaaacagggagtggggtgtcagccccagacctcaatgaggtccccagattccatgcccaggtcag

SEQ ID NO: 9233 - DNA, 549 bp, Homo sapiens
ctggagcctgagtccgctgcacggagactctggtgtgggtcttgacgaggtggtcagtgaactcctgatagggagacttggtgaatacagtctccttccagaggtcgggggtcaggtagctgtgggtcttagaaatggcatcaaaggtggccttggctgcaaaacaaaagaaccccaggagggtcagtggcgtgcttgaggcaagtcccccaacccaaaaattgtcgcactcctaggaacagagaggccattctgggcgggtctgtcgtgcattaggagagcctttctctgcctccctgaaaacacgccaagcacacactggacccgtgtggttaagcggagctgagagaccatggctatgccccatgtgtggaccacctaccgaagttgcccagggtggcagtgcagccccgggctgaggtgtagcagtcatcgataccagccatcatgagcagcttcttaggcacaggtgcggagacgatgccagtgcccctgggtgcagggatgaggcgtaccagcacagagccgcagcggcctgtcaccttgcaa

SEQ ID NO: 9234 - DNA, 561 bp, Homo sapiens
aaatcctattatcaaaatttgggggggtgatgattaagtaaggtaatgtatataaacatgtagtgcagtgtctggcacatagtaaacaaattttttattgacagatattataacataaataagttttacctgatggccttccttgataatctattcgctctcctcgccagtactccaaaggtttcaaacgtgttctcttggtcctgcgaacatttggtgtgttggagggcaatactagtttgtgatggattctgttctttggtatcactttagattgttttgagtcatctgaacttccatgaacttcctcatcatccacatcattctttccagacattaaataattattattgagcctggaaggtccactttcctctaaaactgaagtcttatgctctccagaatccaagtttgactctgttggtatattacatgtatatccactggtctgaggctttaggggaacattctgtgcagtcataatgttatcttcattctttgagcttcttgtagatctagaacaatcaagatttttcttcttagccaagtctgcctcatcac

SEQ ID NO: 9235 - DNA, 58 bp, Homo sapiens
aatcaataaagcttgccttaaattatttttatatgactgttggtctctaggtagcctt

SEQ ID NO: 9236 - DNA, 254 bp, Homo sapiens
atcaaacaaaagtcactgaggaagaaaataagggttcaggtacaggtgcagccggtgcctcagacacaacaataaaacccaatcctgaaaacactgggcccacattagaatgggataactatgatttaagggaagatgctttggatgataatgttagtagtagctcagtacatgattctccgttggcaagtagccctgtgagaaaaaatattttccgctttgatgagtcaacaacaggatttaacttcagtttt

SEQ ID NO: 9237 - DNA, 291 bp, Homo sapiens
ctgcttttatacccccttgccccgccaacgtagttaagagaacagcagcataagcggctggcagaggcaaggaaagaccagtagagagaaaaaaaggccatctataccaattctaagttaatttagactaaacaaggtcttaatagcaaaggataattgaaatcccaaacttacaaggttttcaacaaaagtgaagtttgcttaaagttaacagtgtaacatgtattatggtaacttctaatcttgtggccttagacagtctagtccaaaggcataaagaaagtttgcttt

SEQ ID NO: 9238 - DNA, 513 bp, Homo sapiens; identical to SEQ ID NO: 148

SEQ ID NO: 9239 - DNA, 319 bp, Homo sapiens
cctgcctgctgtagtttatttcttttgccttgttcagtgaatttacccagagggtggctgagattgaggctttgggagccccaagaagctgcttggttttaatgtgctaccttatagctgagcctgttgtgctcagggcaagtagtaggatgttccccctgggatgtgcaaggttctctcaagcagacatgagcctccatcactcccaccactccctgcaactcagcctcctcttctcagcctgtgccttcctccagttctagtaaacactgccaaatgaatatagttctccgactcttctctgggggttcattggcag

SEQ ID NO: 9240 - DNA, 216 bp, Homo sapiens
cctgtgtgtcctgctcagccactctgtcgaccacactgacccaggggctgccccggacatagaagcggaggggtttccgggcccactcccctgcatggccgacgcccacccgggctgctgccactacagccggctcactgggctccaggggaccacgctccagccatacagcttcatcctgtgccaggtccctctggtcaaagctcttgttgatgg

SEQ ID NO: 9241 - DNA, 223 bp, Homo sapiens
ctgagggtacagctctgagaattggcgctggaaacagttcttggactgtgatagccacaacagatgctgtttctgggatcccaggaccagggctctggaagatgccactgcagtggtagtgcccgctgtctgccttttgtaccacggtgatggagaattccctgttaggcccggggggacccagagctgagccatctcggtagaaggtcacctgagtcagtgg

SEQ ID NO: 9242 - DNA, 359 bp, Homo sapiens
  unsure (37): n=A,T,C or G
  unsure (40): n=A,T,C or G
  unsure (43): n=A,T,C or G
  unsure (90): n=A,T,C or G
  unsure (222): n=A,T,C or G
ctggcttctggcccctgcttcacgcccccagcgccgncgnccnttcctgagtggagatgaggatcccaaggcttccacgctacgtgttgnggtctttggctccgatcggatttcagggaaggtggctcgggcgtacagcaaccttcggcggctggagaacaatcgcccactcctcacacggttcttcaaacttcagttcttctacgtgcctgtgaagcgaantcatgggaccagccctggtgcctgtccaccccctcggagccagacgccctcacccccgacagactcccctaggcacgccagccctggagagctgggcaccaccccatgggaggagagcaccaatgacatctcccact

SEQ ID NO: 9243 - DNA, 306 bp, Homo sapiens
aaaaactggcccttacctgacagagccctggctttgacctgctcagccctgtgtgttaatcctctagtagccaattaactactctggggtggcaggttccagagaatgcagtagaccttttgccactcatctgtgttttacttgagacatgtaaatatgatagggaaggaactgaatttctccattcatatttataaccattctagttttatcttccttggctttaagagtgtgccatggaaagtgataagaaatgaacttctaggctaagcaaaaagatgctggagatatttgatactctcattt

SEQ ID NO: 9244 - DNA, 373 bp, Homo sapiens; identical to SEQ ID NO: 6

SEQ ID NO: 9245 - DNA, 393 bp, Homo sapiens
ccaagactggtggcctggaaatagactcagattttggtggcttccgggtaaatgcagagctacaagcacgctctaacatctgggtggcaggagatgctgcatgcttctacgatataaagttgggaaggaggcgggtagagcaccatgatcacgctgttgtgagtggaagattggctggagaaaatatgactggagctgctaagccgtactggcatcagtcaatgttctggagtgatttgggccccgatgttggctatgaagctattggtcttgtggacagtagtttgcccacagttggtgtttttgcaaaagcaactgcacaagacaaccccaaatctgccacagagcagtcaggaactggtatccgatcagagagtgagacagagtccgagg

SEQ ID NO: 9246 - DNA, 375 bp, Homo sapiens
ccattcccccagccttctccatgacgtaggccatggggttgcattcgtacagcagtctcagctttccattggggctcttcttgttagcggggtacagaaatatccctccgtagaccagagtgcgatgaacatcagccaccatggagcccacataccgggccccataaggagctgaattatctggggggaacttcttcctctggatgtactcattgacggcagggtcaaagtccttggcgtagccctcgttaaggctgtagattttacctttcttttttatcttcacatccttgtccaccaaaatgaactccccgatggcctttttagacaaggaaggaaaggtggagagatgacgagcgcactgggtcccccagg

SEQ ID NO: 9247 - DNA, 268 bp, Homo sapiens
  unsure (185): n=A,T,C or G
gagtgtattcgcatctacgacgtgcacacctgcaagtagggcaccagggcgctgggaaggggtgaagtgtgtggctgggcggattcagcgaagtctcatgggaagcaggacctagagccgggcacagccctcagcgtcagacagcaaggaactgtcaccagccgcacgcgtggtaaatgacccanacccaactcgcctgtggacggggaggctctccctctctctcatcttacatttctcaccctactctggatggtgtgtggttttt

SEQ ID NO: 9248 - DNA, 377 bp, Homo sapiens
ctgtggcgggtgttagagatgtctgacatcgtcctgcttatcactgatatccgacatccagttgtgaatttcccgccagcactttatgagtatgtgactggagaacttggactggccctggtgctggttttgaacaaggtggatctggccccgccagctcttgtggttgcctggaagcattatttccatcaacactatccccagctccacgtcgtccttttcacctcttttcctcgggacccccgcaccccacaggatcctagtagtgtcttgaagaagagtcggaggcgggggagaggatggactcgggccctggggccagagcagttgctgagagcctgtgaagccatcactgtggggaaagtggacttgagcag

SEQ ID NO: 9249 - DNA, 181 bp, Homo sapiens; identical to SEQ ID NO: 149

SEQ ID NO: 9250 - DNA, 329 bp, Homo sapiens
  unsure (250): n=A,T,C or G
  unsure (274): n=A,T,C or G
  unsure (276): n=A,T,C or G
  unsure (280): n=A,T,C or G
ctgcctgagctgtggctccatggagtgggggaactgctccaggggccctggatccaggctcacagtgaaagctgctttgttaccagctcgggcgtagtccatttctgtgtatttcgtgaaccactcattcacctcctcctttgtgcggttggtgaacaggagacccacctcacccctcaaccttttgctgacctggtgcaggttgtctttgtattcatcagatgggctccgacccaaggccaccatcatnaccttgtttttgccaaagaacatncngctntgcttccaggcgttccggatgtccttcagcttgctgttcctcatgttgg

SEQ ID NO: 9251 - DNA, 296 bp, Homo sapiens
ccacgctggaggagccccaggagggcttggagtttgcccacatggccctagcactcagcatcaccctgggggaccggctgaacgagcgcgtggcctaccaccggctggccgccctgcaacaccgactgggccatggcgagctggcagagcacttctacctcaaggccctgtcgctctgcaactcgccgctggagtttgacgaggagaccctctactacgtgaaggtgtacctggtgctcggtgacatcatcttctacgacctgaaggacccgtttgatgcagccgggtactaccag

SEQ ID NO: 9252 - DNA, 310 bp, Homo sapiens
  unsure (301): n=A,T,C or G
aaagaggaagctggcgcgtatggcagccgaggagcacactctgcaggacactggacaagacagtaaatattcaacttttaatgctgattaaaggagtataggtaaagaatacgtaggtatacataattggtgagacaaatattcactttatttatattttatatattatttttttaatttggtaaatactatccagttttgtagttgtccttgttgatttgtgtgatattaaagtattagtaataattgccaggaaactatcattagggagggtttagttggttgctgtttggactggganggatgattt

SEQ ID NO: 9253 - DNA, 521 bp, Homo sapiens
  unsure (376): n=A,T,C or G
  unsure (511): n=A,T,C or G
aaaggtgtgtgtattctgtttgcatctccctgtcactgtgacacacctagatgtgtgttacttcaattaaaattctcaaatttaattttgatttgcttcagaagggaaaatattctcaataatgtaaaataattaaggtctatacatgggttgtatttttctggttcacaacagcacaaagtgtctttcatttttttgttggttttcttttaagatcttttttaccctgaagtcagtgaatacttttctagtttatttgatactctttctgtgtatatattaagcttttgctgtagattgcctagtaaaattactaaggataggttgtttttacatatggtctatttaagtctgatgtttacgggggaaagtgtanttactaaaaatgtttaacataatttggaagaagagtatgaacaaccaataccaatacctattgcgtttggattcttaagaccccagtttgttattccactaaactagttatcttaaccatatcatctggttttgngggccattat

SEQ ID NO: 9254 - DNA, 397 bp, Homo sapiens
aaacattattcactactgtttttgaagtgagaaagtatcagccatttagcatttaagttggggtatttagagcctgtaatctaaatgctggctcaaatttattccccagctacttcttataccactattcttttaatgtttgcataatcataagcacctcaacacttgaatacataatctaaaaattatatagtaaagctggtagccttgaaaatgtcagtgtgatatctattatgtagataaatatatatagtggcctttcaggactgtcacagtaacactttatttacagagctaatgtttgtcctaaattttcaggaccctagaggagagctttatacaattaccgatgtgaatttctctaaagtgtatatttttgtgtccagttatattattt

SEQ ID NO: 9255 - DNA, 255 bp, Homo sapiens
cttgacgaggctgcggtgtctgctgctattctccgagcttcgcaatgccgcctaaggacgacaagaagaagaaggacgctggaaagtcggccaagaaagacaaagacccagtgaacaaatccgggggcaaggccaaaaagaagaagtggtccaaaggcaaagttcgggacaagctcaataacttagtcttgtttgacaaagctacctatgataaactctgtaaggaagttcccaactataaacttataaccccag

SEQ ID NO: 9256 - DNA, 385 bp, Homo sapiens
ctgctgcactgcactttgcgattcaacaagtcagggaagaaaacatcaggaagcagctaaagaagctggactgcgagagagaggagctattggttttccttttcttcttctccttgatgggcctgctgtcgtcacatctgacctcaaatagcaccacagacctgccaaaggctttccacgtttgtgtagcaatcctcgagtgtttagagaagaggaagatatcctggctggcactctttcagttgacagagagtgacctcaggctggggcggctcctcctccgtgtggccccggatcagcacaccaggctgctgcctttcgctttttacagtcttctctcctacttccatgaagacgcggccatcagggaagaggacctcggccg

SEQ ID NO: 9257 - DNA, 529 bp, Homo sapiens
aaaagtttttatttacctaaaaacataaatttatcaaacatatcaatttgctttgcagagcaatttacataaaaattcatgatgtataccaacgacagcatagcattatctacctcagtttgtgaagcatcctttcctacagatctcagcaaaacgcagagccagtaggggaaattcaagctttcatttgggggcctctggggtcctacctgctggcagttctttcagcagaaagtggggtacgggggatgctgaagagggggaagtggaccccattgcctgttaagtcccatctgtctcagtttgaagcaacacgggaatttccattggaggagggttggcctgccggcctggcccttctctcacgccccctctacttcagctacatttcttatgcatgttcctcaaagctgtgaaaatcaatacaaaaaaaactgacctttacttcattcctgtaacaggctatcaggatctcaaggagatccacctgcatcgagatcagtctcaaaaacggggcatgtaaaacata

SEQ ID NO: 9258 - DNA, 494 bp, Homo sapiens
ccttatttctcttgtcctttcgtacagggaggaatttgaagtagatagaaaccgacctggattactccggtctgaactcagatcacgtaggactttaatcgttgaacaaacgaacctttaatagcggctgcaccatcgggatgtcctgatccaacatcgaggtcgtaaaccctattgttgatatggactctagaataggattgcgctgttatccctagggtaacttgttccgttggtcaagttattggatcaattgagtatagtagttcgctttgactggtgaagtcttagcatgtactgctcggaggttgggttctgctccgaggtcgccccaaccgaaatttttaatgcaggtttggtagtttaggacctgtgggtttgttaggtactgtttgcattaataaattaaagctccatagggtcttctcgtcttgctgtgtcatgcccgcctcttcacgggcaggtcaatttcactggttaaaagtaagagacag

SEQ ID NO: 9259 - DNA, 320 bp, Homo sapiens
caacgatgaggctgctgtcatttgtggtgttggctctatttgctgtcactcaagcagaggaaggagccaggcttttggcttccaaatcactgctgaacagatacgccgtggagggacgagacctgaccttgcagtacaacatctacaatgttggctcaagtgctgcattagacgtggaactatctgatgattccttccctccagaagactttggcattgtgtctggaatgctcaatgtcaaatgggaccggattgcccctgctagcaatgtctcccacactgcggtcctgcgccctctcaaggctggttatttcaacttc

SEQ ID NO: 9260 - DNA, 450 bp, Homo sapiens
cctcccaaagacagcaatgggagaagtgaccccataactgcataaaataatccctcttctttgaagctcttggcaggaatcgctcagccagcaggaaacctttaacccaatacccagaaaaacagacatttggaggaagagggatcttccagattattcttccattctgccccatcctctacagagaaggaaactaagacacttttcaagaatcacaagataagttaatgatagaaagcagagtagaatcttgagtggaggagtgaaaataacattcactttgttcaaatcccagctctaccactttccaatggtgtgaacttgcacaaataactctgagtctcattttcttcatttgtaaaatggagagaacaatctccgcttcaagagattgtcttaaatggaacatgcaaagcatcactgatatcgtttaccaaccacacatagcag

SEQ ID NO: 9261 - DNA, 342 bp, Homo sapiens
aaacttttgagttgtagtcagaaactgttgttggactgcatagttttcaaaagtttttggtacatttctgactttagaaatctggggtaggaatccctttccatatgcatatagactattttctgagcttcttcaaaacatgtttcagtgggttcctgaatgttcctgatgatagtctctcttgtcgaactgtcaatgttaatctctctaggggactgtggctggatgtaaatcttataaagcttctttgccctagaaattccgctccaccgtgaggcaattttcttataggtttcacatgccatccagaattgaatattctcgtcactgtgctccattttt

SEQ ID NO: 9262 - DNA, 201 bp, Homo sapiens
cctctgtggatcccagtttgtcgtggggtcagaggaaaaaactttactatgacacggactatggttccaagtcccgaggccggcagagtcaacaggaggcagaggaggaggaaagagaggaggaggaggaggcacagatcattcagcggcgcctagcccaagcgctgcaagaggatgattttggtgtcgcctgggctgagg

SEQ ID NO: 9263 - DNA, 580 bp, Homo sapiens; identical to SEQ ID NO: 330

SEQ ID NO: 9264 - DNA, 318 bp, Homo sapiens
ctgccggcgccgggaaaggggctcacgtaccagggactctccattgaggtagatgaggtcgaaggcgtacaaacacacctgcacctggatctcagacgcatccacctccttgcgtttgcgggtggtgagcacttggaatggctggatctgcttcttttcccggtcccaagccacggcttcggtgtccaggatgaaggatgtgaccgatgggagtttaatcttggggatgcggctgatgatgtccgggtacttcccagtgttgtcttcctgattcctgctgaagatcttcacctccccgccttccagggcgtggatctg

SEQ ID NO: 9265 - DNA, 232 bp, Homo sapiens
cctgagatcagaggaaagcccccaatccgtgtttcacaggtactcacaagagaaaatgctaggagggttgtgccttgctaagggaaggaagaaaagttgggggtggggagcatgagatttgatgcagttagtaaagaatgaactctgaaaagtgttacgagagagagagagacttaaaacaaccatttgtttagctcatgactctatagattggcaattgagctgagttcag

SEQ ID NO: 9266 - DNA, 199 bp, Homo sapiens
aaaagaagaagaaaagctaccaaagctgaaatggtggcacctccttcgagtgagcccgggagtcctccctgacggccgaggcaggctctggccgcactcccgctcgagtctcccttcctgtctgcagattctgcgtgacagtcacggaacggcgtgatgggggcagcagagcgtgggggcctctgtccagcactcgtgg

SEQ ID NO: 9267 - DNA, 474 bp, Homo sapiens
ctgatgactttcttaatagaattgcattgacggatgcttaccttttatacacaccttcccaaattgccctgactgccattttatctagtgcctccagggctggaattactatggaaagttatttatcagagagtctgatgctgaaagagaacagaacttgcctgtcacagttactagatataatgaaaagcatgagaaacttagtaaagaagtatgaaccacccagatctgaagaagttgctgttctgaaacagaagttggagcgatgtcattctgctgagcttgcacttaacgtaatcacgaagaagaggaaaggctatgaagatgatgattacgtctcaaagaaatccaaacatgaggaggaagaatggactgatgacgacctggtagaatctctctaaccatttgaagttgatttctcaatgctaactaatcaagagaagtaggaagcatatcaaacgtttaactttattt

SEQ ID NO: 9268 - DNA, 260 bp, Homo sapiens
ctgtttccttctcttcctttgtggtgccattcccagggcacaggccatagctgtagttggggggcagtgggtatgggatgtgcccccggggcatcaggaggaaagtgcgtgctacatgccaggtactgcagacagagatgaagatgaaggaggccctgaggctgatgcctttttcataaagaagcttaataataaggaagactgccgaggaagagtcaaatgctccattgtacagagtgatgatggtcgaacggtgttgg

SEQ ID NO: 9269 - DNA, 136 bp, Homo sapiens
ccaaacagtgcccagcttaagcatccctggcatcagactatggccttcaagagcactagggcatatgcttttggcagcataacgggctggcttggtgatggagggaaaaagccttgagccaggcagaagtttgtgg

SEQ ID NO: 9270 - DNA, 251 bp, Homo sapiens
ccttcgtcagcctgcccagagaaggggagcagaacttcagtgcagaggagttctctgacatctctgagatgcgggccttggcagaactcctgggcccctatggcatgaagttcctgagtgaaaacctgatgtggcatgtgacctctcagattgtggagctgaagaagctggtggtggaaaacatggacatacttgttcagatcagatccaactttagcaagccggacttgatggcttccctgctgccccag

SEQ ID NO: 9271 - DNA, 356 bp, Homo sapiens
ctgctcggaaagctctggacagatgcagtgaaggctccttcctgctaaccacatttcctcgtcctgtgactgtggagcccatggaccagttagatgatgaagagggacttccagagaagctggttataaaaaaccagcaatttcacaaggaacgagagcagccacccagatttgcacagcctggctcctttgagtatgaatatgccatgcgctggaaggcactcattgagatggagaagcagcagcaggaccaagtggaccgcaacatcaaggaggctcgtgagaagctggagatggagatggaagctgcacgccatgagcaccaggtcatgctaatgagacagggtgagtctagg

SEQ ID NO: 9272 - DNA, 406 bp, Homo sapiens
ccaggctggtctcgaactcctgatctcatgatccgtctgcctcggcctcccagagtgctgggattacaggcatgagccactgcgcccggccaagaaagtatgtttttagaggtgtgtgtaagtgcatttgtattacctatgaacaaaattacctgactcttgtcccaggaaagctgtttcgcattttcgctttttgattggtattatccagttctatgtagttcatattattgttctgtctgactctcagaaattacttcttcacgccagtgtcttgttgcatgactttgatgtcacctataggaatacacctcactgcacgtaagtgggtatcttactgtataaaaggtctacatggctttaggttttaggacaaatgtgtagatttatagaccatttctgctgg

SEQ ID NO: 9273 - DNA, 306 bp, Homo sapiens
  unsure (11): n=A,T,C or G
  unsure (277): n=A,T,C or G
  unsure (280): n=A,T,C or G
  unsure (297): n=A,T,C or G
  unsure (301): n=A,T,C or G
ccttgcctcanatccaaggtcactcggaagaggccatgtctaccctcaatgacactcatggaggaaatgctgagagaagcattcagatgcatgacacaagagccaatgaaaggccctattgctatgcaatctggtccaaaaccactcttcaggaggatgtcttcactggtgggccccacgcaaagcttcttcatgagggaatctaagactttgggggctgtccagattatgaatgggctcttccacattgccctggggggtcttctgatgatcccancanggatctatgcacccatntgtntgact

SEQ ID NO: 9274 - DNA, 243 bp, Homo sapiens
ctgtggcttagctggctttgctggtcgtaatggaggacaaaagtgccttctggtgaaactcagcttccatagtgatgggacctaagggtagcagagtttatggtgaccctgtagtgtatctccagaaatggtgattgtttgaatgcatgtaagacattccctagggactccaagaaatattgattagaggaagatgtggtgctttgaaagggacttggtgttcctacatgaaccaagtgaagg

SEQ ID NO: 9275 - DNA, 548 bp, Homo sapiens
aaataaaattcagtccggccgcggtggctcatgcctgtaatcccagcactttgggaggccaaggcagacagattatctgaggtcaggagttcgagaccagcatggtcaacatggtgataccccatgtctactaaaaatacaaaaaaataaaaattagccaggtatggtggtgggtgcctgtaatctcagatacttgggaagctgaggcaggagaatcacttgaaccagggaggcgaaggttgcagtgagccgagattgcaccattgcactccagcctgggcaacaagaacgaaactccgtctcaaaaaaaaaaataggccaggcgtggtggctcatgcctgcaattccagcactctgggaggccgaggcgggcggatcaagaggtcaggagatcgagaccatcctggctaaaccccatctctactaaaaaacaaaaaaaatcagccagacgcggtggcgggtgcctgcagtcccagccactccagaggctgaggcgggagaatggcatgaacccaggaggtggaggttgtagtgagccaaaatcgcgc

SEQ ID NO: 9276 - DNA, 333 bp, Homo sapiens
aaaaaaaacaacagcgtaaatattagcccacaagagcagtcctaaacaatcacaattacactgtactacccaagaagactgtttattgtgaagcatttacctttcaaaaaatcattacatttctatttcttggtggagcagcacattgtggagtgtgattcttaattcttcattgagtttgtcaataggacattgatgctggataggttgtcttttgtttttatgtctcagaccatcttgtgagattgtttgcctatctcataatacagttttatgcagaaaggttgaaactatgtaaatggtttttatggaaattatcagttacaacatttt

SEQ ID NO: 9277 - DNA, 157 bp, Homo sapiens
aaaacatcgcgctaagtggacgaattcagacacaaccgtctacgtgttgtatggctgcattcacgttcaagtcaagtccaaatagggcacactgcagagacaaagccaggtcatggttgctcaggaccggaagcctgttgggggcggggggtggggt

SEQ ID NO: 9278 - DNA, 252 bp, Homo sapiens; identical to SEQ ID NO: 151

SEQ ID NO: 9279 - DNA, 546 bp, Homo sapiens
ctggagagattgttgaagcagatgttgccattgggaaaggcgatgagactccacttacaaatgtgaagacagaggcatcccctgaaagcatgttgtctccatcacatggctcaaatcccattgaagatcctttagaggcagagactcagcacaagtttgaaatgtcaggatgccccaggtgaggatgaggaggaagatggtgtcagtgaagcggccagcctagaggagcctaaggaagaggatcaaggagaaggctacttgtcagaaatggataatgaacctcctgtgagcgagagtgatgatggcttcagcatacacaatgctacactgcagtcacacacactggcagactccatccccagcagccctgcttcttcacagttctctgtctgtagtgaggatcaggaagctattcaggcacagaaaatttggaagaaagccatcatgcttgtatggagagctgcagctaatcataggtatgccaatgtcttcctgcagcctgttacagatgacatagcacctggctaccacagcattgtgcagagg

SEQ ID NO: 9280 - DNA, 346 bp, Homo sapiens
aaaatgtctttgagtctgtccctttctctctgttcccactgcccctgctcaatactgtcatttgattagactattgtataagcctctcttatgaactgaatatttttgtcttccccaaattcatgttgaagctgtcactcccaatgtgacggtatttggaggtaaagcctctgggaggtaattggtttagatgaggtcatgaggatggggcctccatgatgggattagtgcccttgtaagaaagtggaagagagaccagagttctttatctccaccgtgtaaggccacagcaagaaggaggccgtctccaagccaggaagagagccctcccagggaactcactcag

SEQ ID NO: 9281 - DNA, 539 bp, Homo sapiens; identical to SEQ ID NO: 551

SEQ ID NO: 9282 - DNA, 459 bp, Homo sapiens
gtgttgtgctgtggggaagggagaaggatttgtaaaccccggagcgaggttctgcttacccgaggccgctgctgtgcggagacccccgggtgaagccaccgtcatcatgtctgaccaggaggcaaaaccttcaactgaggacttgggggataagaaggaaggtgaatatattaaactcaaagtcattggacaggatagcagtgagattcacttcaaagtgaaaatgacaacacatctcaagaaactcaaagaatcatactgtcaaagacagggtgttccaatgaattcactcaggtttctctttgagggtcagagaattgctgataatcatactccaaaagaactgggaatggaggaagaagatgtgattgaagtttatcaggaacaaacggggggtcattcaacagtttagatattctttttattttttttcttttccctcaatccttttttattttt

SEQ ID NO: 9283 - DNA, 113 bp, Homo sapiens
ccagcttcttcagcaaggtcatgggcatcctcatcaaccgcaagacagaccagctcgtgtcctttcttcggaagaaggatgacttcgtggacctgctgctgcagcacattggc

SEQ ID NO: 9284 - DNA, 179 bp, Homo sapiens
  unsure (71): n=A,T,C or G
  unsure (168): n=A,T,C or G
gttttaaggcgccatgaggggtgacagaggccgtggtcgtggtgggcgctttggttccagaggaggcccangaggagggttcaggccctttgtaccacatatcccatttgacttctatttgtgtgaaatggcctttccccgggtcaagccagcacctgatgaaacttncttcagtgagg

SEQ ID NO: 9285 - DNA, 542 bp, Homo sapiens; identical to SEQ ID NO: 331
  unsure (492): n=A,T,C or G

SEQ ID NO: 9286 - DNA, 484 bp, Homo sapiens
  unsure (426): n=A,T,C or G
ccattggaatctcatttataaatggaccttttaagtatattaattcctcttcagaattgagctggacacatttggcattcttagtttgtcatataaccaggtttatccttagtctaactgcaagggatagaacctgccctaggtcacaatcattctgtccaatccagccaaggttccctccacatatgaagatggaccatggcaggatacaactgattgtgtggcaccatgtattagcagtgggaatatgtatcacatatgatgcagcctttcatatttcagcagtttgccactgtgactgtctggcaagcccccagatggcgttatattaattggattagattattttgctcaccttatgtaatactgtaacttcctataacctaatattttcggtatcattaaccaaaatttcacactcatagnttgctaaagagaatgttattcaatcattaaactctgaactgatttcttctatacattt

SEQ ID NO: 9287 - DNA, 502 bp, Homo sapiens
ctggatgacctggggcaagccgcttccccactctgtgcctcagcttttcatcagcaaagtagagataaaaacagcatccacctcactgggctgctgtgaggattatcggagcttgtatttgtgctcggcacaggtaagcaccagttaaagaaactgggtaacaggacaaatgcttatctacacagacaagactcctgaagttataaaccacagactatggtctacacagctcatatcaggtgctgtgcccagggcttgggacctaccagcacatttaaccctgtaaggtagattattattatacccattttccaggtaaggaaactgaggcatggatttacatagaggtgggggcggggctggacagaggtaccaaagctcacagcttctagaaggatgttctgtgcatgaggcagtggctatgaccctgctggactaattcaaggacatgctctccccaaattgtgcctctgcatctcaccgagatggctcagttctgtgc

SEQ ID NO: 9288 - DNA, 375 bp, Homo sapiens
  unsure (25): n=A,T,C or G
  unsure (182): n=A,T,C or G
  unsure (195): n=A,T,C or G
  unsure (206): n=A,T,C or G
  unsure (230): n=A,T,C or G
  unsure (296): n=A,T,C or G
  unsure (353): n=A,T,C or G
  unsure (364): n=A,T,C or G
ctgatgcctcactactagatgcagngctgggaccttcctcttttggagctgtcccatgtacagtggacccaagctcaggaccttcgtggagctgcttctccaacctgagaaactcaagacccatcctcccgctgtcactttggacaatggaaatctacattttcttttcccttttttttttnttttgagacagantctcgccctgncacccaggctggagtccagtggcncaatcttggctcactgcaacctctgcttcccgagttcaagcaattctcctgcctcagcctcctgantagctgggattataggcatgcaccaccacacccagctattttttgtatttttactgnagacagggttncaccatgttgg

SEQ ID NO: 9289 - DNA, 337 bp, Homo sapiens
  unsure (83): n=A,T,C or G
ccaagggtaggggcggggcggggaagtgaaccccgacggtcagcgctttgtcatctggtttcagccccgctgccgtgcacggngggactggagcaagtcgctcacctgaaatgagtatgagcagaccttccctgggttacgaattgagatgggatgaaaatgctttaacttcgagtgttttgaaggattaaataaccgaagtacaaagtagtagtagcggagacagtaaggaagtcgggcgtggcggcgcgcacctgtggtcccagctactcggaaggctgaggggggaggatcacttgagcccaggagttcgaagctgcagtgagctgtgatgtgg

SEQ ID NO: 9290 - DNA, 316 bp, Homo sapiens
ctggaatgttgttggaggtctggtctccttccttggggaaagtgattttggttccttctttccaccccttcttcacttcgatggtcaatattttgtcttcgtttcgaatgctctttccgtcggggtttagccgcttgtgggagattttcatcttcttggtacagccgctgtagatctcttcaagggagactcgaaggtcgtgggtgactgggggatcttgcttctttcgggcgggctcttgggcagagcgggagcggccaaagttcacgttggtgaagccacccatgcccatagggaagccagagaatgggtcatc

SEQ ID NO: 9291 - DNA, 287 bp, Homo sapiens
cctccacccaggtgccacgcacggtgcctcatacccagagagtagccaacattggtactcagaccacaggacccagtggggtaggatgctgtacaccaggccggccgctcctgccgtgcaaatgttcctcagcagcacatagcacctatcgggtccaggagccggctgtgcacatcccaggacaggagcccctgaccgcgtccatgctggctgcggcgcccctgcatgagcaaaagcagatgattggggagcgtctctacccccttatccatgatgtccacacccag

SEQ ID NO: 9292 - DNA, 380 bp, Homo sapiens
aaaaaatcttaggtttttttaagaagcagaaataatttccaaattgcctccagagacaatgattttatcctctgcagaagctggtcagaaccttcttgatcacagccccagttagatacagggaagaatggcgcttcctacagcttcagcggcctcagctcagctctgtgccccaaggccaaaccagctcatctccagccccatccatcctattcttgctgagtcaccagtctcatcatcttcagagccatgtccccttggtcagaaggaaccatatgaccagctttcagaatccagtagaaagcaaggttcttgtaggacttgacaaaagcagatgtttccaaagatttagggtcactgtacagggccttccacttcag

SEQ ID NO: 9293 - DNA, 366 bp, Homo sapiens
ctgcagggcgaaccgctgcttcctattggtgtccaccacgcgctgcacatcttcagcagagaagccgcggaactggggcaactgcaggagggtgcccaggggcacgaagccatctgtgggcaggcagggtgctcaggagctaaccttgctctggactgggccagggttaacagggagccacaggcaaccgaaacaaagtctgggcttggagatcgcttgggcatcctctgtgggacctttagaaagtctcccctttctgggccgcagttttttcaacttacataaaaagaggatctgcctcacggaggggcagggaggtgagtgcccagcatagcgctggcccggagtgcacactcacaccaccag

SEQ ID NO: 9294 - DNA, 333 bp, Homo sapiens
aaacttatctgtttgtaaattgtaactgattaagaattgtgatagttcagcttgaatgtctcttagagggtgggcttttgttgatgagggaggggaaactttttttttctatagacttttttcagataacatcttctgagtcataaccagcctggcagtatgatggcctagatgcagagaaaacagctccttggtgaattgataagtaaaggcagaaaagattatatgtcatacctccattggggaataagcataaccctgagattcttactactgatgagaacattatctgcatatgccaaaaaattttaagcaaatgaaagctaccaattt

SEQ ID NO: 9295 - DNA, 347 bp, Homo sapiens
aaagctgtccatttatcttgatgcctaaaagttgggagatgctataaagacgatgacatttctaaactggactacactgtttctggaaactgttaagctgagtccagtacttttaagcctgacagtatctgaggatcctaatatggtgctaagccttcaggggtggagcggggaaagagtattaaaaaaggagtgttaaaaaatccctccaaaattcaggaatcagcatcataaatttaaccattcaaaatgtggtattatagaaaccaaaacattcattttgaccaaagaaaatctgtgagtcatttcctaagcctgggaaacaagccacaggatatagtgacttt

SEQ ID NO: 9296 - DNA, 297 bp, Homo sapiens
ccagctctcgagtgggggtgatgattatggctccaacctgactcttttttaacttctcttctcttctcagaagaatttccaggatggggatgacaaaagcgagtgttttgccactacctgtgacccgaggcactcaccgcttctgcagcgacatctttgtttcgcatgaacagagggatggttgcggactgcaccggcgtcatgtacgggaagcccagctcccgcagcgcgcccagcacctgcgggtgcagcggcacaggcagcgactcccaggagccctctgtcacatgctccatg

SEQ ID NO: 9297 - DNA, 247 bp, Homo sapiens
ctgctatttctgcttcagcgaaagccacgatcccagcacacaggcatgcgctactgtgaggtcaggacgaggaaaagagccaggccctttcacccagatcgcggcggcccagcaggacttgcccggagtgtctcatgcagacttttgtgtgtgtgaagaaaagctttttgtcttgctctgggcaccctgaggccaaatatataatacttacatccagccccaaagcccccagtctgtctccactttt

SEQ ID NO: 9298 - DNA, 234 bp, Homo sapiens
  unsure (192): n=A,T,C or G
aaaaacaaaaagagggaatggatgcagaagcccgtctgggctttccgtggagtcgccccttcccaatggcgatggccgctccctgtggcctcagcttcctccgtggaatgaaggggtccaggtgacaccttcctcgaagggtgggcgtgggcctaaggctcccaagtcggccaggggctcggcctggctcanaagaggtgcttcacatcaacagtggtacggggtggccgctgg

SEQ ID NO: 9299 - DNA, 282 bp, Homo sapiens
ctgcagtccctagatctctgcctccgaacttgtgcttctcagaaccccctgagcccctctgggccttgcccctgtcctacatagctttcacaccgaatttatggattggtcccttagtaaccctctaagccttgctcacagttcttaaaaccgtctatctccttccaggctctgtgaagctggtgaccccggaggggtccccagtccggggacttcgcacacctgagatccccatgaccgaagcggtggaggccgtggctatggttggaggtcagcttcagg

SEQ ID NO: 9300 - DNA, 392 bp, Homo sapiens
aaacaccctgagatatgcagacagggtcaaggagctgagcccccacagtgggcccagtggagagcagttgattcaaatggaaacagaagagatggaagcctgctctaacggggcgctgattccaggcaatttatccaaggaagaggaggaactgtcttcccagatgtccagctttaacgaagccatgactcagatcagggagctggaggagaaggctatggaagagctcaaggagatcatacagcaaggaccagactggcttgagctctctgagatgaccgagcagccagactatgacctggagacctttgtgaacaaagcggaatctgctctggcccagcaagccaagcatttctcagccctgcgagatgtcatcaaggccttgcgcctgg

SEQ ID NO: 9301 - DNA, 404 bp, Homo sapiens
ggcggagaagctggagtgactctagggcagccgcatctttcgcgtcaggatctcaccaccttggatgttaccaagttgacgccactttcacatgaagttatcagcagacaagccacaattaacataggtacaattggtcatgtagctcatgggaaatccacagtcgtcaaagctatttctggagttcatactgtcaggttcaaaaatgaactagaaagaaatattacaatcaagcttggatatgctaatgctaagatttataagcttgatgacccaagttgccctcggccagaatgttatagatcttgtgggagcagtacacctgacgagtttcctacggacattccagggaccaaagggaacttcaaattagtcagacatgtttcctttgttgactgtcctgg

SEQ ID NO: 9302 - DNA, 197 bp, Homo sapiens
ccatcgtgcctctttgggcttccatgggcaactacatcaccaggatggcgcagaagtaccatgagtactcccactacaaggagcaggatgggcaggggatgaagcagcggcctccgcggggctcccacgcgccctatctcctggtcttccaagccatcttctacagcttcttccatctgagcttcgcctgcgcccag

SEQ ID NO: 9303 - DNA, 167 bp, Homo sapiens
ctgcgaatcggggagcccatgtattgacttagtgcggtagcatgcagccctcggcacggagggtcagtccccgctgttcttaaattagggtaaatggcgttggtgtccgtatttacagacttgaaatgtatcaatcctgagcagttccgatgtaaatccgagaccag

SEQ ID NO: 9304 - DNA, 243 bp, Homo sapiens; identical to SEQ ID NO: 622

SEQ ID NO: 9305 - DNA, 499 bp, Homo sapiens; identical to SEQ ID NO: 152
  unsure (250): n=A,T,C or G
  unsure (284): n=A,T,C or G
  unsure (452): n=A,T,C or G

SEQ ID NO: 9306 - DNA, 293 bp, Homo sapiens
cctggcctcacatgacccctgctccagcaacttgaacaggacaagcagcagctacatccttaaggtcgggaaagtaagatgaggatttggatcctgcattgccctgcctcccaccctatctctccccaaattataaacagccatccttgggaagcagcagagttaagacgtctccccactgccctagtgacatacacaccaacaggagagcatgttcagatggcacagaatccagggactgcatttcatgaggagaaactggtaccaaaatatgggtggggagtcggggggtg

SEQ ID NO: 9307 - DNA, 468 bp, Homo sapiens
ggcggccggtgagggggaagcaagtctggtctctgtgattgaagaagtcggctctgggctccagtgcgggaatcacacacatacctcagaatgccgggtctaagttgtagattttatcaacacaaatttcctgaggtggaagatgtagtgatggtgaatgtcagatccattgctgaaatgggggcttatgtcagcttgctggaatacaacaacattgaaggcatgattcttcttagtgaattatccagaaggcgtatccgttctatcaacaaactcatccgaattggcaggaatgagtgtgtggttgtcattagggtggacaaagaaaaaggatatattgatttgtcaaaaagaagagtttctccagaggaagcaatcaaatgtgaagacaaattcacaaaatccaaaactgtttatagcattcttcgtcatgttgctgaggtgttagaatacaccaaggatgagcag

SEQ ID NO: 9308 - DNA, 545 bp, Homo sapiens
  unsure (453): n=A,T,C or G
  unsure (511): n=A,T,C or G
ccagcaaaaaggagcgttttctccaggtgcagtccatgatgtacgatctgatggagtggaggtcccagcttctctcaggaaccttacccaaggatgagctgaaggaactgaagcagaaagtcacgtccaaaattgactatggcaacaaaatccttgagcttgatttgattgtcagagatgaagacggaaatatcttggaccctgataataccagtgtcatcagcttgttccatgcacatgaggaagcaactgataaaatcacagagcgtatcaaagaagaaatgtcaaaagaccagccagattatgcaatgtattcccggatctcctcatcccccacccatagcctctatgtgtttgtgagaaactttgtgtgcagaattggggaagatgctgagctcttcatgtctctctacgaccccaacaagcaaacggtcataagtgagaactacctantgcgatggggcagccggggcttccctaaggagattgagatgctcaacaatctgaaggnggtcttcacggatcttggaaacaaagacctcaac

SEQ ID NO: 9309 - DNA, 342 bp, Homo sapiens
  unsure (187): n=A,T,C or G
  unsure (309): n=A,T,C or G
aaacttttgagttgtagtcagaaactgttgttggactgcatagttttcaaaagtttttggtacatttctgactttagaaatctggggtaggaatccctttccatatgcatatagactattttctgagcttcttcaaaacatgtttcagtgggttcctgaatgttcctgatgatagtctctcttgtcnaactgtcaatgttaatctctctaggggactgtggctggatgtaaatcttataaagcttctttgccctagaaattctgctccaccgtgaggcaattttcttataggtttcacatgccatccanaattgaatattctcgtcactgtgctccattttt

SEQ ID NO: 9310 - DNA, 356 bp, Homo sapiens
aaaaattagtctgtactcaaatgcatagttaaaaaaatgaagcgagatggcagtttgtgcagtaatatctgcccttcgaagttcatgcaaccaactaatgcaatttttcctttcactcgtaaatctgaatgcagttcagtcatttgaaaccatctacaaaatccacaagattaagcagtttgccaagattaatatctaacagttgagcactggagaaagtgagggaaaggagtaaaaacaaacaacgaaaaagaccaagttagctagatatttcaactacataagggaggtgggtgaatgtcaaggctacaaaaacgaaacaaaaacaggaaaaaaaagtggcagcaatttttttt

SEQ ID NO: 9311 - DNA, 243 bp, Homo sapiens; identical to SEQ ID NO: 154
  unsure (13): n=A,T,C or G
  unsure (92): n=A,T,C or G
  unsure (147): n=A,T,C or G
  unsure (159): n=A,T,C or G
  unsure (169): n=A,T,C or G
  unsure (170): n=A,T,C or G
  unsure (182): n=A,T,C or G
  unsure (193): n=A,T,C or G
  unsure (203): n=A,T,C or G
  unsure (229): n=A,T,C or G

SEQ ID NO: 9312 - DNA, 328 bp, Homo sapiens
aaaaagatccaaatgtgactgagatcattccagcctgcactttttatttgtaggcagaaggaacgggataggttgaggggcgtgatgggggctctcgccacctcttgtctgcacctctggaacaggtggtagccgaatcattcaagtcctacctggtcagactcccaaccacgctgaggcaggcccttacctggatggcctcatgggcctccctcttgaaaagaccctcactctgtttggaaaagatcccttagcagccataatcaggaaagagactctagagcgagcccagggcttccccaaagcggattttctgtcctgttttcag

SEQ ID NO: 9313 - DNA, 313 bp, Homo sapiens
cctcggtggggccgggcaggcagggcgggagctagcctgcaagagaaacagccccaatgctgggtaagagagcagttcaccccatccccccctccacgaccctggcgcccgccctgtacctgaaggcgcccgggttctgctgcagcgcatctggtaccatgtcttcattctcctcctggcagagggagcacatggagtagacgagccgctgcagggaagggaaagtgagcgcgtggcacagggctcgctgctggaaccctgccagggcatgcagacgcaccgggctaggtgtccctgccccgggatcctccag

SEQ ID NO: 9314 - DNA, 430 bp, Homo sapiens
  unsure (395): n=A,T,C or G
  unsure (407): n=A,T,C or G
ccaacatggggaaaccccatctctactaaaaatacaaaaattagccgggcgtggtggagcacctgcagtcctagctactcaggaggctgaggctggagaatcgcttgagcccggaaggtggaggtgcagtgagccaagatggcgccactgcactccagcctgggcaacaaccacaactgaaaaaaaatctactgaggccagagtgagttggggcggggagcatggagagggggtcaggcttagccccaacaactcagaatttcacttccttgtacggccctcactttctccacctggccccggggcaggtctgagggtctgaagtctgttgatctgaaggtcctaggcaaatccagtcacttgggagccggagatatttaacatcacggcccggncccctttcccangggactcatttcctagcactctc

SEQ ID NO: 9315 - DNA, 310 bp, Homo sapiens
ccggcctgcagaccgactgcgaggcgctgctcagccgcttccaggagacggacagtgtacgcttcgaggacttcacggagctctggagaaacatgaagttcgggactatcttctgtggcagaatgagaaatttagaaaagaacatgtttacaaaagaagctttagctttggcttggcgatattttttacctccatacaccttccagatcagagttggtgctttgtatctgctatatggattatataatacccaactgtgtcaaccaaaacaaaagatcagagttgccctgaaggattgggatgaagtttt

SEQ ID NO: 9316 - DNA, 209 bp, Homo sapiens
  unsure (187): n=A,T,C or G
  unsure (189): n=A,T,C or G
cttttttttttttttttttttgacctggagtctcgctctgtcacgaggctggagtgcagtggagcgatctctgctcactgcaacttctgcctcccgggttcaaacaattctcctgcctcagcctcccaagtagctgggactacaggcgcgtgtcaccatgcctggctaatttttgtatgtttagtananacggggtttcaccatgttgg

SEQ ID NO: 9317 - DNA, 435 bp, Homo sapiens
ctggattaaggacatgatcttgaacttccagacatctgaatttcagtacacactggatttaggtacctaatgggtggtcctggacacactgtgtacacgtaaaagagaaactgtggggaaaaatgtagaaaacagaaaggagccaccaaaaatccatgagtggaggacagtaaaaggtaggtggacagactggtttgtgttaaagataatggtctagaaggggctatactcagaattattcctgtgtccgtgcaggcagttgagattattaacaggtggtggagagaacaggttgctgttgcagattcagtgtctgagggtagaattatactaggagacctataggcacttgtgtaggtttttggcaagaaactagaaaagaaggcactgtgatgggattcctaagggtggtacttactcctgggaggggcatgg

SEQ ID NO: 9318 - DNA, 373 bp, Homo sapiens; identical to SEQ ID NO: 90

SEQ ID NO: 9319 - DNA, 175 bp, Homo sapiens
ccagagggaccgtaagactggtacaagtttacaccataagaggcgacgtggtcagccacaatgtcttcacctccacaggggctcatcacggtggtcagggcaagggtccccagcatcagagctttgtttaggatcatcctcttcccaaggcagccttagcagttgctgttctgag

SEQ ID NO: 9320 - DNA, 173 bp, Homo sapiens
ctggcttgcctgctggcctgcttcctggagataggatgctcagacccaccgccgctcttcaggggtcgtggaaggaattaatgcacttccttctgtcccccaatctctgtccctttacgtgtctctggagctgagcaggtattctttttctttcttcatctcagtagagctgg

SEQ ID NO: 9321 - DNA, 353 bp, Homo sapiens; identical to SEQ ID NO: 327

SEQ ID NO: 9322 - DNA, 284 bp, Homo sapiens
aaaaatacagttccccaggttgaggtatgtggtggcctgttgtcacggcagcatgagcacggcggcgcccagggcgggggcggaagggcctagctggagactgccatcacgtagttcttggaggggctgctccggcccagcagcacttggttcttgcaggtgaggagcccacaggaggcggccagtggggcctcctcgtacaagacgcagatggagccgtcctccccaatgcggtaggacacctcataggggtccacccacagggtcagctcgctgggcagcag

SEQ ID NO: 9323 - DNA, 356 bp, Homo sapiens
aaaaaaaattgctgccacttttttttcctgtttttgtttcgtttttgtagccttgacattcacccacctcccttatgtagttgaaatatctagctaacttggtctttttcgttgtttgtttttactcctttccctcactttctccagtgctcaactgttagatattaatcttggcaaactgcttaatcttgtggattttgtagatggtttcaaatgactgaactgcattcagatttacgagtgaaaggaaaaattgcattagttggttgcatgaacttcgaagggcagatattactgcacaaactgccatctcgcttcatttttttaactatgcatttgagtacagactaattttt

SEQ ID NO: 9324 - DNA, 475 bp, Homo sapiens
ctgcggcgactgcggggcccagccaagtgccgcgagtgcgaagccttcatggtcagcgggacggagtgtgaggagtgctttctgacctgccacaagcgctgcctggagactctcctgatcctctgtggacacaggcggctcccagcccggacacccctttttggggttgacttcctgcagctacccagggacttcccggaggaggtaccctttgtggtcacgaagtgcacggctgagatagaacaccgtgccctggatgtgcagggcatttaccgggtcagcgggtcccgggtccgtgtggagcggctgtgccaggctttcgagaatggccgagcgttggtggagctgtcggggaactcgcctcatgacgtctcgagtgtcctcaagcgatttcttcaggagctcaccgagcccgtgatccccttccacctctacgacgccttcatctctctggctaagaccttgcatgcagacc

SEQ ID NO: 9325 - DNA, 314 bp, Homo sapiens
ctgtatatgggttcagattagaaaatattaaataaatacagggaaaaatatttttaattagcttaatttatatatgaagatattttatttaatttgtttttgagacagggtctttctctgtcacccagactggtgtgcaatggcacaaacacatctcattgcggcctggacctcctggcctcaggtactatgcctagctaattttttttattttttgtagagatgcattctcactatgttgcccaggctggtcttgaactcctggcctcaagtgatcctcccgtctttaccttccaaagggttgggattacagg

SEQ ID NO: 9326 - DNA, 545 bp, Homo sapiens
aaacaaacctaaaatcagtttaacctgcaatgagactttggaaccagctacagtccttaaaacagatgccagaaattgctcatgtggtgacagaaactgcagaataggtgaaatgcttgctgtttcctcatatgctcaggttggcatcttgagcttccatggggtttcggtgcccctcaaaaaacctggacctgcaattctggaatgctgccaccaggggaaggtatggcttgatcacttgccagatttatagaaggctcaggtaagtactgcagctcctggggataactgccttggagtagagagaaactgttgagaaatcatggatccagataactccaaaaaaagagtaatgtgcctgtccatgcatcacccttacatacagacatggagacatttacagagtgagtgaatcacagccacatccaggtagatggcaagaacccaagcctatcatcagccacagtccagggaatttctgtgaagaatgggcatacctgccttcctttgtaaataattctcttcttccacttaaatcgttattt

SEQ ID NO: 9327 - DNA, 307 bp, Homo sapiens; identical to SEQ ID NO: 155
  unsure (256): n=A,T,C or G
  unsure (302): n=A,T,C or G

SEQ ID NO: 9328 - DNA, 425 bp, Homo sapiens
aaaaagaagaggaggaggagcgaggactctgaagaagaagaactagccagtactccccccagctcagaggactcagcgtcaggatccgatgagtagaaacggaggaaggttctctttgcgcttgccttctcacaccccccgactccccacccatattttggtaccagtttctcctcatgaaatgcagtccctggattctgtgccatctgaacatgctctcctgttggtgtgtatgtcactagggcagtggggagacgtcttaactctgctgcttcccaaggatggctgtttataatttggggagagatagggtgggaggcagggcaatgcaggatccaaatcctcatcttactttcccgaccttaaggatgtagctgctgcttgtcctgttcaagttgctggagcaggggtcatgtgaggccagg

SEQ ID NO: 9329 - DNA, 345 bp, Homo sapiens; identical to SEQ ID NO: 332

SEQ ID NO: 9330 - DNA, 462 bp, Homo sapiens
ctgagaggccaccagtgaggctgggccttatcttccccgccccacccctccccctctcaggctgtgccagcctcaggcaggccctgtgcatctctgggccagtctcaaatccttactgaatggctagatctgtgtacttcaggtctgtctttctgtttcttccactatttctacggctcataagtctctgtctcttctttcagggcgtctatttctttctcttgttctctctttttcccgtgtgtttccctttggagctgtttatgcctgtctcccttggtccaggtcggtgtgtctttctattaatttattttttgagacagggtctcactctgtcacccaggctgagtgcatggctcactgtagcctcaaactccctggctcaagtgatcctcccacctcgacctcccaagtagctgggaccccaggtgcacaccatcacacccggatttttttttacct

SEQ ID NO: 9331 - DNA, 127 bp, Homo sapiens
aaatccagaagacaaacctagaaaagcagcaagataaatatttacaaacattgtagaaaaacagcagtatttcaagttttgttaaattctttccttcagacataatgtagacatagaggaggaacag

SEQ ID NO: 9332 - DNA, 550 bp, Homo sapiens
aaatatcacaagtaggtcttaagtgtcatctggcatcttctttctgtagccaggtaactcttagatcttattcatcagcctgctgaacagttcctttttcagagacatagataccatccaaaaatttcctgatatccttgtttttaactgttgtggcttgctgaatcaaagccgctgaatttgaaacaagctcaatgtcatttccttcaaggattaattcatctttctgggcttgagatactgaacaagcaacacctggtctcatccgaaccctgcggatgtatttttcacccaagaaatttcggatttcaacaagagacccattctcctggataacaacgttgatggggaagtgagcatacacagacctcatcttgtaacggaagcccagtgtaacacccttgatcatgttctgtacatgactacaaatagtccgaacggtagccagtttctttctgttaccccaccatttgtcaacccggagcctcttttttttctttccaagaaggctgagttctacattgatgtgattgaagtccctccgcaacct

SEQ ID NO: 9333 - DNA, 507 bp, Homo sapiens
ccacggagcccaatcctggcacaatgtggaggaggatatgaatcccaggaggcagggatgactgcaggcatcttggaggctgactaccaaccatggataggtaaatgagtgccaggagttaggagatcacacctcggtagagagagttccttgagccaggaagactatgcacaggctcaggaaggctggctgggcctaaacagaagtgggtcaaaggttaaggagtatgtctcagtctatttgggctgccatagcaaaatgccatagactgggtaactcataaatagcagaaactgattcctcacagttctggaggctgggaagtccaagatcaagttactggcagattgggtgtctggtgggggtccattcctcatagatggcatcttcttgctgagtactcaacatgacaggaggggtgaacaagctccctgaggtctcttttatatgggtactaatcccatccataaaggctctgccttcaagacctcgtcaccttcccaaagg

SEQ ID NO: 9334 - DNA, 437 bp, Homo sapiens
aaaggcacttatttatcattgtaggtgtgtctaaacaattgatattcaaaaacacaactttttgtgtacaaaattttacaatttttaacaaaagcagtgaagacactaaataacccagtggcgacctcttcaaagtgcagtgtccctggtcaccaatgcagatgctactggggcagccagcgggctcagagggtccaactccagacactgcatccatggctgtcctagactgagttgcacttgtaaaagagatggtcccacacctactaaaaaaacaagctactctagtatcaatatgacatcactcttttaccatcaatcatattgcaaaaccatagtatttaacgaccaataaacagccaaatacctaatgccacattgtcgttcaatttacctggctggttaatatcagtctgtgtttgagtatttcttttgag

SEQ ID NO: 9335 - DNA, 358 bp, Homo sapiens
aaaagctccaaccagctcatgccagctttccagagtcccatgatttccatttaagaccatgtggatactttaggatacggccctgaccccacattgccacagaagagggggtaagagtagaaccaaacaagttagcagttttctccacacattgagtctcatctgaaatactactgaggtgcaaaatgtgtgaatctcagctaatgtgcacagaaatacaattttttttgagagacatttgcttaaacgtggtaaagaactcttgttttatggactccttgcttcatgttcattttgtctgtttttcttttggcttttgacaatagctcatcctttttgagtgtgagtttaattatgg

SEQ ID NO: 9336 - DNA, 236 bp, Homo sapiens
catggaggtcatgtcttttcactgatacttttttgatagtttttatataacaaaatccttactctatttataacttaagatgataaggcactataaattaatgacctaaaataatatatttgtctgttatcttttgctatttctacttcactttaatttttagctgtaaaattggtaaatggattcttacaactatctctttccatttcttactatttggttttcaaatttcattt

SEQ ID NO: 9337 - DNA, 502 bp, Homo sapiens; identical to SEQ ID NO: 156

SEQ ID NO: 9338 - DNA, 86 bp, Homo sapiens
ctgacctgcttgaccgaaggatttctgacagactatctttggggatgttttcaagaagggatataagttatttactttgggcattt

SEQ ID NO: 9339 - DNA, 456 bp, Homo sapiens
cctctgcgattttgaaggacaactgctgctaaggagtctatctgtgattggagggttgaaacagtattaggtaagtcttccaaactgtttgtaagatcttgtgagagggagcaatagtacatgagggaagtagaaagcccgaccactccggttccaactgcagtagtcattcctagtcgtactaggatgggtattaactgaacggccctgcattggcacacttgagtttttacagggataggtaggttttgcttcctgggacaatgtcgatttttgggcttagaaaaaccagagtacaggtaccagtccagttgatagggtagcagaggtaggtggaggtaccgcacaggaagaatatgccttggctaggtaagtaaaattggttgtgtatgttaaaaagatgtgtaagcttgtggtctttgtatatccatgctcctagggtgcttgctaaggcag

SEQ ID NO: 9340 - DNA, 542 bp, Homo sapiens; identical to SEQ ID NO: 333

SEQ ID NO: 9341 - DNA, 538 bp, Homo sapiens; identical to SEQ ID NO: 157
  unsure (449): n=A,T,C or G

SEQ ID NO: 9342 - DNA, 323 bp, Homo sapiens
ctgtaagggccatttgaaagtttggaattttaagtgtctgtggaaaatgttttgtccttcacctgaattacatttcaattttgtgaaacactcttttgtctacaaaatgcttctagtccaggaggcacaaccaagaactgggattaatgaagcattttgtttcatttacacaaatagtgatttacttttggagatccttgtcagttttattttctatttgatgaagtaagactgtggactcaatccagagccagatagtagggggaagccacagcatttccttttaactcagttcaatttttgtagtgagactgagcagtttt

SEQ ID NO: 9343 - DNA, 298 bp, Homo sapiens
aaattaaatagctccagacaaaagcatgttattttccacatacgctatctttgtattctgcacagagttccaaggcaaagattgctcctggctttatgaattaccagagatgatgacttgtgtggctgacttatcacaggtcttttactcttccttcctgatagatccttagcttctttgggaggtggcatatgaattggtttccacggaattggattataaaaggctggttctggataggaatttccactgtaaaaacctgtaagttttccattggcataaccatagctctttgcag

SEQ ID NO: 9344 - DNA, 326 bp, Homo sapiens
aaagcagtaaaaattgaggtgcccttggatatccacaagcctaaattgagtacacccttgaaccagagcccctcagttaatggggtgaccgacatggggtagctgatcccagggggcattcccctctcgagctggccctgcactgggtggcctggggattgtgcttccttgcacagtggtgcacatttctatgtgtggatgagattttcttgtcaacttttcctgccaagacactaaatgcttttcagtgctaatactgacctgatagtagagatttctttccctgagtcggatggtagcaggatttacttggtaacccttggttt

SEQ ID NO: 9345 - DNA, 228 bp, Homo sapiens
ctggaagatggccgtactctttctgactacaacatccagaaggagtcgaccctgcacctggtcctgcgtctgagaggtggtatgcagatcttcgtgaagaccctgaccggcaagaccatcaccctggaagtggagcccagtgacaccatcgaaaatgtgaaggccaagatccaggataaagaaggcatccctcccgaccagcagaggctcatctttgcaggcaagcag

SEQ ID NO: 9346 - DNA, 466 bp, Homo sapiens
ccttctgcgccctccctgagcaccggctcaggcaccggggtcaggctgcaggaacacatggacagggagaagtaagagtagtccactgcaacgtatgtcagcatgaagttgatggtgacgatgggggccagaacgttcacttgacccacaaaaacaaaggccatggtcaccaagctggtcaggcagatggcagccacgggtgttttgtttggccccttcccttgtcccagacaggcaagtgcagggatcactttctcctgggcaatgcactgcaggatgcggggagctccataaagtcctcccatgcaggaagccagggacgagatgtataagcccaaaaggaacaggaagcccatgagggataccttttccgctatcaggaagtcatagcgaagggcctctcgagtgcagatggcgcccaggaggaagacgaagacgatgtacagaaaccacgagatgccaacag

SEQ ID NO: 9347 - DNA, 527 bp, Homo sapiens
  unsure (69): n=A,T,C or G
  unsure (161): n=A,T,C or G
  unsure (515): n=A,T,C or G
ctgagctgctgtctgctttggaaaaccgttcctgccgctgccgatggatggaaatgcaatggatttcancttcttatcatcagccagggccaagcagtttttcactgtcttttccagaagttcttcacacttgtctgcatcccaaactggactattacagnggatcacaaacttggcaggcaggccatggcctgcgctgacagcagctccagctacttccaagggcccgttctttttccggagttccaggacagcttccacaaactcctcatagtcgatggtcctgtccccatccttgtcggcctccttcatcatctgctccgcctccacctcgttgaggggctcccctgcgttcattagcacgtacttgagtgtgttccagtcaatgtagcccttgccctctttgtcaaagacacggaatgccgccctcagctcgctctcctggttctgggccttctcatggtaaactcccattagtgccaggaaaccatcgcagttgaagaaccctttgttgnctctgtccacat

SEQ ID NO: 9348 - DNA, 288 bp, Homo sapiens; identical to SEQ ID NO: 2745

SEQ ID NO: 9349 - DNA, 580 bp, Homo sapiens
cctgaggatagacagaatgactcagaaaactccttttgaatgcagccagtctgaggttatgtttctgagcttggacaaaaagccagagagcaagagaaatgaggaagcttgcaacatgcccagttcttcttgtgaagaaagttggttcccaaagtatatagttccatcccaggacttaaggccctataaggtaaatatagatccttcttcagaagctccagggcattcttgcaggagcagtccaaagatggtgacaagtcttttttcttttactttcaaggcagttttaggaagcattccctgtctatcttccaaatatgatctggattttaattttgcaaaaaaaatactgcattttctcacttaaaaagtaggagctaaatgatgagaacacgtggacacatggagaagaacaacacacagtggggcctttcagagggtggagagtgggaagagggagaggatcagaaaaaataactaacaggtactaggcttaatacttgattgatgaaataatctgtacaacaaacccccatgacacaagctgacctgtgtaacaaacctgcatttgtacccctga

SEQ ID NO: 9350 - DNA, 299 bp, Homo sapiens
ctggatttattacttataagtttgctattaacctggtatagctgtattttaatactagggtcatcagatgaagaaagcaaatctaaacaagaaaataatgtcctggttatgtgattatcacatacaggtgggagtacctacaggaagggggaagaagtgaaataattttgaagggacaagcctaaacagtccgagtgggtttccgagtgtgcaaacagtggaaccttcagagattatttttacaaaagaaatgatcagactactagcctgtgtctttgaataaccatccattccccttt

SEQ ID NO: 9351 - DNA, 413 bp, Homo sapiens
tgaaaatcgaatcgggtgtgatcctaggccaagctcatggcccagcagggccagcaggggcagatggcaagtggagacagcaatctcaacttcaggatggtcgcagagatccagaacgtagagggtcagaacctgcaggagcaggtttgccctgagcccattttcaggttcttcagagaagacaaggtggagattgcaagtgcaataacaaggccatttcctttccttatgggcctccgagaccgctccttcatctccgagcagatgtatgaacattttcaagaagcttttagaaacctggtcccagtgacaagagtgatgtattgtgtactcagtgaactggagaagacatttggctggtcacatctggaagcattgttcagcaggattaacctgatggcctatcctgattt

SEQ ID NO: 9352 - DNA, 146 bp, Homo sapiens
aatgacgccgtcatggcacggggaacatttgccaacattcgcttgttaaacagatttttgaacaagcaggcaccacaggctatccatctgccttctggggaaatccttgatgtgtttgatgctgctgagcggtaccagcaggcagg

SEQ ID NO: 9353 - DNA, 391 bp, Homo sapiens
  unsure (280): n=A,T,C or G
  unsure (306): n=A,T,C or G
ctgttgtagtcccaaactctgggctcaagcagtcctccaacctcagcctcccaaagtgctgggattacaaatataagccactgtgcccagcccagttctgtttttttttttagatggagtcttgctgtctcccagcctagagtgcagtggcacaaccccagcccactgcaaactctgcctcccaggttcaatcaagcgattctcctgcctcagcctcctgagtagctggcattacaggcatacgccaccacacccggttaattttttgtatttttagtanagacggggtttcaccgtgttagccangatggtcttgatctcctgacttcatgatccgtctgccttggcctcccaaagtgctgggattacaagcgtgagccgctgcacctgg

SEQ ID NO: 9354 - DNA, 340 bp, Homo sapiens
ccagggcccctgcagcctgcctgaatttcaactgcatgctgattctcttgccagtctgtcgaaatctgctgtccttcctcaggggttccagtgcgtgctgctcaacaagagttcgaagacaactggacaggaatctcacctttcataaagtggtggcatggatgattgcacttcactctgcgattcacaccattgcacatctatttaatgtggaatggtgtgtgaatgcccgagtcaataattctgatccttattcagtagcactctctgaacttggagacaggcaaaatgaaagttatctcaattttgctcgaaagagaataaagaaccctgaaggagg

SEQ ID NO: 9355 - DNA, 304 bp, Homo sapiens
  unsure (18): n=A,T,C or G
  unsure (61): n=A,T,C or G
  unsure (279): n=A,T,C or G
cctcaggaaacttacagncatgacagaaggggaggcaggcatgtcccacatggtggagcangaggaagagctcacctacagcaaattatttaagaccgagcatttgtctctgttctgttccctctctggacgcaccctcctgcctccaccctgacttgccgtctcctgagcactgaagatatttttggcttgtccgatgtgactccacagacagcagaaacgcttgcttgatcagggcagcatcagggcaccacacatgcctgggcttgcacaacgcancgggagcactgccactcagcagcag

SEQ ID NO: 9356 - DNA, 297 bp, Homo sapiens
ctgagagaggctgaagagattctgcaagtaagcttccacgcagaaggtgttggaaagactttgagagtcccccagctttctgaccctggcttttgtggagaggtctgggaagatgggagatagtgagctcaaagaaggagaagataatggcgtatgtcccacattttctcccagggtatggcagcctccctaatacccttataagctaggaagctcctaggatgctgcagctcagtcaccatttagtaatgtctggagagatttgtggttgtcctaagagtgggagggtgctgcagg

SEQ ID NO: 9357 - DNA, 230 bp, Homo sapiens
  unsure (42): n=A,T,C or G
  unsure (88): n=A,T,C or G
  unsure (123): n=A,T,C or G
  unsure (139): n=A,T,C or G
  unsure (148): n=A,T,C or G
gtacaagctttttttttttttttttttttttttttgggacanagtcttgttctgtctcccagtctggatggagtgcagtggcgccatntcggctcactgcaacctctgcctcctgggctcaanaaattctccctgcctntgcctccanagtagctgggattacagatgcccgccaccacgcccagccaattttttgcatttttagtagcgacggagtttcaccatgttgg

SEQ ID NO: 9358 - DNA, 373 bp, Homo sapiens
ccaacatggtgaaaccctgtctccagtaaaaatacaaaaaatagctgggtgtggtggtgcatgcctataatcccagctactcaggaggctgaggcaggagaattgcttgaactcgggaagcagaggttgcagtgagccaagattgtgccactggactccagcctgggtgacagggcgagactctgtctcaaaaaaaaaaaaagggaaaagaaaatgtagatttccattgtccaaagtgacagcgggaggatgggtcttgagtttctcaggttggagaagcagctccacgaaggtcctgagcttgggtccactgtacatgggacagctccaaaagaggaaggtcccagcactgcatctagtggtgaggcatcag

SEQ ID NO: 9359 - DNA, 222 bp, Homo sapiens
  unsure (99): n=A,T,C or G
  unsure (135): n=A,T,C or G
  unsure (202): n=A,T,C or G
  unsure (209): n=A,T,C or G
ccttcaactgtcaagacaaactttgcaactggatcccggtgggacagtgccctgcagcgaggagtactgtatatgccaatgagagggcccagcttctangaaccgttacaatggcgtcccgagtcattttccctntcccacttgcattcgagagtgagaaaacacacaaggtggccttgattctcactcaccacaatccccntgtacanaggggtctgtttc

SEQ ID NO: 9360 - DNA, 323 bp, Homo sapiens
ccttggcatggaggaggcggcctctcctggcaactcaccaatggggacttatcattcatataaaccatggggtcctgcagaggaagaaacaagagtgaaggactaagaattctggagctgaaagcaccaagaatgcaggggacccttgccccagccacctggggaggtggaagaggacacagatgggtgcagggcaccgacatccttcctggggtgctcaccagggacttctcctcctgcctgagccactggtagtcctccaccatctgcttctgctgtttgtccaggatttgccgcattttgaccttttcagcctcccacag

SEQ ID NO: 9361 - DNA, 290 bp, Homo sapiens; identical to SEQ ID NO: 159
  unsure (260): n=A,T,C or G
  unsure (274): n=A,T,C or G
  unsure (275): n=A,T,C or G

SEQ ID NO: 9362 - DNA, 232 bp, Homo sapiens
cctagtatctggcttgtgttttttgggtataacgtggtgactccacagcctctccagctcaggacagcagggctttgaaagcagagaatttgggtatgaatcctagattttccaatgactaactctataatatggaggagttctatctgattatcctcgaatcatcctttgtaaaatggaataatatgcttctcttccttcgatttgttgtaaggagccaatgaaactgtgg

SEQ ID NO: 9363 - DNA, 529 bp, Homo sapiens; identical to SEQ ID NO: 552
  unsure (297): n=A,T,C or G
  unsure (315): n=A,T,C or G
  unsure (339): n=A,T,C or G
  unsure (378): n=A,T,C or G
  unsure (481): n=A,T,C or G
  unsure (484): n=A,T,C or G

SEQ ID NO: 9364 - DNA, 293 bp, Homo sapiens
ctgccacagacacccccttcctgtttgaagactgagataatgtctcccctgtaccaagatgaagcccctaagggaacagaggcttcttcggggacagaagctgccactggccttgaaggggaagaaaaggatggcatctcagacagtgatagcagtactagcagtgaggaagaagagagctgggaacccctccgtggtaagaagcgaagccgtgggcctaagtcagatgatgacgggtttgagatagtgcctattgaggacccagcgaaacatcggatactggaccccgaagg

SEQ ID NO: 9365 - DNA, 308 bp, Homo sapiens; identical to SEQ ID NO: 4308

SEQ ID NO: 9366 - DNA, 373 bp, Homo sapiens; identical to SEQ ID NO: 6

SEQ ID NO: 9367 - DNA, 444 bp, Homo sapiens
cctctgcgattttgaaggacaactgctgctaaggagtctatctgtgattggagggttgaaacagtattaggtaagtcttccaaactgtttgtaagatcttgtgagagggagcaatagtacatgagggaagtagaaagcccgaccactccggttccaactgcagtagtcattcctagtcgtactaggatgggtattaactgaacggccctgcattggcacacttgagtttttacagggataggtaggttttgtttcctgggacaatgtcgatttttgggcttagaaaaaccagagtacaggtaccagtccagttgatagggtagcagaggtaggtggaggtaccgcacaggaagaatatgccttggctaggtaagtaaaattggttgtgtatgttaaaaagatgtgtaagcttgtggtctttgtatatccatgctcctagggtgc

SEQ ID NO: 9368 - DNA, 445 bp, Homo sapiens; identical to SEQ ID NO: 4402

SEQ ID NO: 9369 - DNA, 441 bp, Homo sapiens
  unsure (398): n=A,T,C or G
  unsure (401): n=A,T,C or G
  unsure (417): n=A,T,C or G
ctgtgtgcggcgacgagagagtgtagaaataaagacacaagacagagataaaagaaaagacagctgggcctgggggaccactaccaccaatgcgcggagaccggtagtggccccgaatgtctggctgcgctcttatttattggatacaaagcaaaaggggcagggtaaagagtgtgagtcatctccaatgataggtaaggtcacgtgggtcatgtgtccactggtcagggggcccttccctgcctggcagccgaggcagagagggagaggagacagagagaaagacagcttacgccattatttctgcatatcagggactattagtactttcactaatttactactgctatctagaaggcagagccaggtgtacaggatggaacatgaaggcggactangancgtgaccactgaagcncagaatcacagggagacggttagg

SEQ ID NO: 9370 - DNA, 493 bp, Homo sapiens
ctggctaattcagtcatgcaaactctgctctcacagttaaaacagttctatgagccaaaacctgatctgctgcctcctctgaaattagaagcttgtattctgacccaaggagataagatctctctacaagaaccactggattatctgctgtgttgtattcagcattgtttggcctggtataagaatacagtcatacccttacagcagggagaggaggaagaggaggaggaagaggcattctacgaagacctagatgatatattggagtccattactaatagaatgattaagagtgagctggaagactttgaactggataaatcagcagatttttctcagagcaccagtattggcataaaaaataatatctgtgcttttcttgtgatgggagtttgtgaggttttaatagaatacaatttctccataagtagtttcagtaagaataggtttgaggacattctgagcttatttatgtgttacaaaaaactctctg

SEQ ID NO: 9371 - DNA, 261 bp, Homo sapiens
ggcaaaagaagatctgacagctcctatataccttatcttactgaattcttaaactttgaaccagttcttccacttactgacttgttaccactgctgactttctgaaaagttttccagtttttgttttttgttttttgttttccagtaggggattagaatgtttagtcctacttagtaagaaaaatattgtatcaaattacctttaggctatgtatataaggtgtatatgaagcataaatgaatttcatgtttagtcttgag

SEQ ID NO: 9372 - DNA, 158 bp, Homo sapiens
ccgaccgcgagccgtccaggtctcagtgctgtgccccccccagagcctagaggatgtttcatgggatcccagccacgccgggcataggagcccctaggaacaagccggagctgtatgaggaagtgaagttgtacaagaacgcccgggagagggagaag

SEQ ID NO: 9373 - DNA, 618 bp, Homo sapiens; identical to SEQ ID NO: 334
  unsure (601): n=A,T,C or G

SEQ ID NO: 9374 - DNA, 274 bp, Homo sapiens; identical to SEQ ID NO: 160
  unsure (182): n=A,T,C or G
  unsure (211): n=A,T,C or G

SEQ ID NO: 9375 - DNA, 242 bp, Homo sapiens
ccactaccccaacaccatcgctgagaaacacggcttcagggacctgcggcagttcatcgacgagtatgtggaaacggtggacatgctcaagagtcacattaaagaggaactgatgcacggggaggaggctgatgctgtgtacgagtccatggcccacctttccacagacctgcttatgaaatgctcgctcaaccccggctgtgacgaggatctctatgagtccatggctgcctttgtcccag

SEQ ID NO: 9376 - DNA, 591 bp, Homo sapiens; identical to SEQ ID NO: 639

SEQ ID NO: 9377 - DNA, 404 bp, Homo sapiens
ctgtgagcctcagagctcctggctgcctgttgctgagtctattagctgctgagccttgatctttgtgtttctaagatttgtcctagtccatttatggatctaattgtcgctcttaatttctttacatcttcttctggaaccaggtctgttttattaatgagaatggcatctgccaaagcaacttgcctagtagcttcattgataaggccatcaggtttctcttctgttaaatgttttaatccatattttgaatccacaatagttatgataccatcaagataaatatcactccctaattcagcatcaacccaaaacatagaagccactgcaccagggtctgctaatccagtggtctctaacagtatgtaatcaaatttccccttcttttgcatcaaattctcaat

SEQ ID NO: 9378 - DNA, 428 bp, Homo sapiens
  unsure (110): n=A,T,C or G
  unsure (117): n=A,T,C or G
  unsure (290): n=A,T,C or G
  unsure (307): n=A,T,C or G
  unsure (371): n=A,T,C or G
ctgcagtaacttttcaccccatcattataccagtgctcatctgactgatgaaaaagaggaaagaataatcatttctagatactgaggttgcgaactagttctgtggcagnggactancataagtggatgtctaagaaatttttcagttcactagactaaaatgttttacaacaaaaagcctccagttagcctcctttctagagtatatgttcagcaatgttgatctcataaaaggaaaaacaaaagatttaagtattctatataccaagtttttgttttgtttttactgnatttattttattgaggntctttatattcctgcctcttcatagtcaaggctcttagtacaggaatattgacttaggaattgngaaaactccttaagtttcttaagttaaggatgtttggcttttttctttaattttttt

SEQ ID NO: 9379 - DNA, 293 bp, Homo sapiens
  unsure (11): n=A,T,C or G
  unsure (38): n=A,T,C or G
  unsure (43): n=A,T,C or G
  unsure (45): n=A,T,C or G
  unsure (67): n=A,T,C or G
  unsure (86): n=A,T,C or G
  unsure (105): n=A,T,C or G
  unsure (111): n=A,T,C or G
  unsure (134): n=A,T,C or G
  unsure (156): n=A,T,C or G
  unsure (171): n=A,T,C or G
  unsure (183): n=A,T,C or G
  unsure (256): n=A,T,C or G
  unsure (282): n=A,T,C or G
ccacacctggngttctggaaaagggagtccagggccantattnangccctgctgtactgcaccctgnaaactgcaccaaaccccanctccgcccccatccacggntcccanaatggtttctggagtccctgcancagacctgtgaggagagggcanggcagggcctgcctnctgcgtccccgngatgacctgggggatgcactgggcagggacagcttcctccatccacacagccctgtgggcaccaacaaggccnctgtgacttcacgcgacagcagtgtnccccagctcag

SEQ ID NO: 9380 - DNA, 378 bp, Homo sapiens
aaagtttgcccttgtgctaaagtgccagtgtatgtatgttatacttgatttggttgtaaactatatttcaaagtaaaccctagtgtaataagttttataactaaaaaggtttaagctgctaaaactatttttaagagatgtgaaatgcagtatgggactatctttttttcctcctctaagcccaaagattaactagagtccctccaaccttatagattgttggctttcacaatcttataacctaggatacaggtagtttcgagtatggtgccagtgatgttttgtttttgtttggtcaaggggtaggtgcaacccaatggaccacttatgcaaaagatgtaaactcttgcataatacattgataacatgttttgccaa

SEQ ID NO: 9381 - DNA, 569 bp, Homo sapiens
ctcagataagctgacatttgagcagagacctgtgctaagtgagggagtgtgccatgaggatatctgggaagagcaccttgggaaagggtcagcaagtgcaaaggccctggggtgggagtgtgcctggcatgcttgagaaagagcagagagaccagggtggctggagtggagtgggagaggggtgaacacataggaaatgaggttcagagggtagatgggggccagatcaggaggccaggtgttaactgtgagcaaagtgggagctgcaggaggagtgagagcagaggacagatgggatctgatttgggactgggaaaggcagagaggcttgcatggcagtggggcccatgcctgccttctggtcagagtagatttcggggagggcctgagggactcctcaggtcctgtgccagcctgggcccccaagaaggcagagctaggggtgaaggctggctccccttccgggaggcccgcaggcagcggtcgcttgtccaggcaggaggatgttctcactgactcggaggaaacagcgtgtcccacatcaaaagggggccgggtggctcccacgc

SEQ ID NO: 9382 - DNA, 188 bp, Homo sapiens
ctgccccgaggccaaggctgcgctgaacatgcccagggcctgctggaactggggcgaggtcagggtattctggatctcatccgcggtctgcggcagcgactccccagatggcaagcagggaagcaggcgctcctggacatccgcgttggcgaggatgggagccattatctccggcgtcagcacactgg

SEQ ID NO: 9383 - DNA, 267 bp, Homo sapiens; identical to SEQ ID NO: 4373

SEQ ID NO: 9384 - DNA, 349 bp, Homo sapiens
aaatcgaaagatggtgtggcttcattaaaaacagtagtgaccaagtcactagcttgatctattgttaaaacattgttgtttactcgattaccaacttcaatatgtacatcagctaatgatgatataagttgtttacattcattctgcattcgtgtgaatggaacggcaatttcgtcataatataaatgttctgaaaggatatcaagtaaacgcggctgcacagctaaggtaacagctttacactccttttgtaaagcagcccattcacagattaccaaagctacactaatcctctgtaaagcagacttggagttcaaatggaagagtagtaactggcccagggattcag

SEQ ID NO: 9385 - DNA, 181 bp, Homo sapiens
gtgtccatgtacctcttccgggtaacagtgaccagtgactcccccaagctctggatcctggtattgggagctgtatttggtttctcctcgtatggccccattgccctgtttggagtcatagccaacgagagtgcccctcccaacttgtgtggcacctcccacgccattgtgggactcatgg

SEQ ID NO: 9386 - DNA, 301 bp, Homo sapiens
ccagacttggtgctctccatagagcagtctgggattatcttggagagctgcacgatccagttgttgatcttgtctcggcggcgacgctccacttcattatgctgagccctgcgtttctcatcccgagtcgtccggggagcttctgacttcggggaataagggtgagtcctaggggcaattgagcgctggcttcctccctgcagtacttcttgtggtgacatcatcacaaagaattgaccagtgccaggaggggtcgcctgccccagcagtgcctctgagccctgggtagtaacaacagcag

SEQ ID NO: 9387 - DNA, 531 bp, Homo sapiens
ctgctccatgtccttcacctctgccagggcctcatcccggagaaggcccatctgctcgtggttgtagaaggggcaggctgcctgcttttcctgcctcctcctctttggcttctcctcctcagctcctttcttcttctctgagggtggcacaggcacaaagagagaaaacagagaggacagcaactgtccacgggcccgagagggggttgtgtaatgttgagacccacttccacagggtggggtctataagaccctcccaagtactgcctactgtgtctcatcggaacactgtaaggttttacttttgttctccagaaagagcccgtaaaatcatctccaagccaacgattcggaccagacgctcacccagagagtaggaacactttttcccaaggagaggggactcaggaaggaactggggtctcctctgccattctttctatgaaagacacttaatggtcttcagtcactgccacccctgcctcactctctccagaccacctgcggctacaccatggtcctggtggctac

SEQ ID NO: 9388 - DNA, 289 bp, Homo sapiens
  unsure (56): n=A,T,C or G
  unsure (79): n=A,T,C or G
  unsure (90): n=A,T,C or G
  unsure (147): n=A,T,C or G
  unsure (156): n=A,T,C or G
  unsure (187): n=A,T,C or G
  unsure (197): n=A,T,C or G
  unsure (205): n=A,T,C or G
  unsure (206): n=A,T,C or G
  unsure (213): n=A,T,C or G
  unsure (222): n=A,T,C or G
  unsure (226): n=A,T,C or G
  unsure (227): n=A,T,C or G
  unsure (234): n=A,T,C or G
  unsure (281): n=A,T,C or G
agtgctgaataaatctcttgctgaacaaagacagcatgaggaagcgaataaaaccnaagatcaagggaagaaagggccnaacaaaagctngagaaggaacaaacagggtcaaagactctaaatggaggatctgatgctcaagatggnaatcagccncaacataacggggagagcaatgaagacagcnaagacaaccntgaagccnncacgaanaaaaagccntccnntgaaganagagagactgaaatatctctgaaggattctacactagataactaggntgacatac

SEQ ID NO: 9389 - DNA, 375 bp, Homo sapiens; identical to SEQ ID NO: 161

SEQ ID NO: 9390 - DNA, 389 bp, Homo sapiens
aaatgtataaataatgtgtacctgtgcacataaataattaaatggggagagagaggaaagaaaaagatagaggagaaaactaaagtgctgtccttttgaagtcaacattacaagtacatgagattcctgtgttaatttaaggaagactttcctgttggtttgttgaatgctctgtgtttcctctgtaatgctttcttagctctttctattgtttcctcaggcattatttcattttcccagttactgtatatttgtacctgcttctggtatgttaagtcctttatcttctggcatgaaccacttgcccattccatcagtgtgcactgcttcttccagtgtcctacgtcaagtgttcactcagagacgcttctattctcatttccagttgg

SEQ ID NO: 9391 - DNA, 269 bp, Homo sapiens
aaacctcacttaatggatgtagtatatacctgggcaactggagctacatttgcccatatctgcaaaatgacagatgtctttgaaggcagcataattcgttgtatgaggcgcctggaagaattgcttcgacaaatgtgtcaagcagcaaaagccattggaaacactgagctggaaaataaatttgcaggaggaatcaccaaaatcaagagagatattgtgtttgctgccagcctctacttgtagagtcagctaaaggaatgtgagatttt

SEQ ID NO: 9392 - DNA, 571 bp, Homo sapiens
cggaatatgacttggacaatctttaccagaagccatccgtaagcccctcagtcacactttccatgtagctgaccagtgactacaggatgtggctgacagtgctcactgaaaggagagttggtgcgggactggtggttctgagcacatagacgcctattagtccttctggtcagtgaacgaaaattctagacctacagttactggctacttgcatttgtcagtttagagaaaaggtaaaatgaggcgttttcaattgtagaatagactaacatttaccacagaagtgcttcagcattctaaatggattagatcactcattaagctatttttatatgccaatttactaatgccttacatcaatccactaataggttgttgggcccgcagtagagtccctatgcagtcccaattctgttttctgtaaccatgtgactggtgatgcagagtgataaccatgtctgcctatcttgtactagactcttcatgctgatcggatcttgcattgaaataaccatgtggaagaacaatgaatcgattaatgatgacatgtacaaccatatttacctcggcc

SEQ ID NO: 9393 - DNA, 265 bp, Homo sapiens
ccagggcctttgcaaacaagccaggccaaaaaggctcaacatttacaccggctgctttaatgagggcattgatcttatcctccgtgactgtcacctcatcgtcgtgcagaatgagggccgagtagatgcaggcgagctcggagacagaggccatggcgcgggcgagtgtagggctggcgctgccggacgcggtgctagtcgccggatgaagtgagggcctcaccccaacgcagccttagcttcctcggaaggaccgagcaccttg

SEQ ID NO: 9394 - DNA, 466 bp, Homo sapiens
aaatgagggcaacaggagatcagagatgccaagagatgttggaaaacagaactggctgaagaaatgacaactgaataaagaggggtgaagggagctgtgaaccacagcaatgccaagagggcatccagccaggcagagtggtctactaggcagagcctcagagaggggaggagttcaccagacccacgtgccatatgggattcatgccagccttgagtctacaccagtgaaaaaaatcagagagttcatgactgaagcaatatgccccagaaataatatctttgtattctgacacttcagtgggttcccattcaatcaccctacagggaagactgccagtagacctgccccccaccccgttcaatatgaatagatctaggatcagaaattggagaaaggtgaaagtggggaaacagaccaagatgaccaaatacaaaaggagtccagaacaaacaagtaatttttt

SEQ ID NO: 9395 - DNA, 392 bp, Homo sapiens
acgaggtcctcctcgctctggccgctcttgctgctcctgtctgaagaaatcagactgatttcctcttaagactcctagggatgtggtgaagagctgggactcaagtgcagtccacggtgtgaaacatgagggaggtgaggtgtccgtccacttcccccataaaggtgtgcatttcagttaggctgccccgctacagagcaggcttcatctgctctgccatccagccccatctggatgtgaggtggggtggagacatcatggggtgattgcagaaagggggagtggcggcccacgcagcttctgctgaggagctgaccgctctgagctgttctgtttcgtattgctgctctgtgtctgcatgtattgtgaccgtgcggctccacctcttccag

SEQ ID NO: 9396 - DNA, 459 bp, Homo sapiens
  unsure (14): n=A,T,C or G
  unsure (43): n=A,T,C or G
  unsure (44): n=A,T,C or G
  unsure (167): n=A,T,C or G
taattgaaatcctnaaaggaatgcaagaattgggagtacatgnntgatcaggaaacatatacagattatgtgattccatgctttgatagtgtaaactcagcacgagccattttgcaggaaaatggatgtctgtctgatagtgatatgttttctcaagctggattganaagtgaagcagcaaatgggaacttagactttgtattatcatttttgaaatcaaatacattgcccatctcgctgcagtctataagaagtagcctactgctaggcttcaggaggtctatgaatataaatctttggagcgagataacagaattgttgtacaaggatggacgttattgccaggagcctcgaggaccgacggaagctgttggctattttctttataacttgattgacagcatgagtgactcagaggtacaggccaaggaggagcatttgagacaatacttccatcag

SEQ ID NO: 9397 - DNA, 216 bp, Homo sapiens
  unsure (49): n=A,T,C or G
  unsure (50): n=A,T,C or G
  unsure (56): n=A,T,C or G
  unsure (103): n=A,T,C or G
  unsure (132): n=A,T,C or G
acatcctaatatatggatcttgatttttaagtttcagtatctgaacttnntaaatnagtaacttttagctgggaaagtatagcatgaaaccagaggttctcanaatgactgtaagatagcttacatttcctntttttgcgcggtgctagtcgccggatgaagtgagggcctcaccccaacgcagccttagcttcctcggaaggaccgagcaccttg

SEQ ID NO: 9398 - DNA, 305 bp, Homo sapiens
aaaacaaggcttggcaccctggcttatgcctgtaatcccagcactttgtgaggccaaggtgggcggatcacctgagctcagaagtttgagtccagcctggctaacatggtgaaaccccatctctaaaagagtacacggtcctagagcagtggtgtgcgcctgtagtcctagctacctgggaggctgaaccaggagaattgcttgagcctgggaggcagaggttgcagtgagccaagatcgcaccattacactccagcctgggtgacagagagaggccctgtgcccctcaaaaaaatgtttttttt

SEQ ID NO: 9399 - DNA, 327 bp, Homo sapiens
cctggaagcccacggggtgcagcatcctcaagcccaggggcgggagcgcctccggcctgccctccagggaagctgcatgtggacctccacggtattcagcctccagtttagtcagccttgagtctgggctgctcccgcacctggtgttttatgcgtgtgatatatgtgtatccatcctgcttccctgccttcaagggaagacttaactctccgagagaaaacctgcctggagctgcgcacattctcacagcttgagaacgcttgacgcaggaagtcaccagagtactcaagtcaaccgcaaactagtggttacaaaatgggagcttt

SEQ ID NO: 9400 - DNA, 457 bp, Homo sapiens
ctggctttcagagcctttccctgccttctggggccctgtgatccctcatgcctacttctttctctcttggtcagccttgtgcgcatgccctctcactcttcatctcttgggcctgtctctgtttctccttggatgttcttctattattcccctctctccatcctccataaataaataatttaatttttttgccttcataaatagtcccctccctgcctctagtcatcccccaagctcctccatgtgcctgctcttcctctgtgtgtggatctaggccccacctagctggtgggacagaccaacagctttgggctgggaattcctaggcaggcttgaaatcctcagccagacagacatcagggatggttcagggaggtgtggtcccctgggatgcctagaattccttctttgaaagctccggtgacttgatcagggaagacttgagctgttggaatgg

SEQ ID NO: 9401 - DNA, 288 bp, Homo sapiens; identical to SEQ ID NO: 162
  unsure (249): n=A,T,C or G
  unsure (256): n=A,T,C or G
  unsure (262): n=A,T,C or G

SEQ ID NO: 9402 - DNA, 153 bp, Homo sapiens
ccatggatgccagccgcttggcatccaggtcaaaggcaaagatccttggttcttcagaagagcagccaagtgactggtcttattgcctggggcggcacaggcatcgatgacatgggagcctggcgggggtccagcagcatggctgggagacag

SEQ ID NO: 9403 - DNA, 297 bp, Homo sapiens; identical to SEQ ID NO: 163

SEQ ID NO: 9404 - DNA, 382 bp, Homo sapiens
ggcttcttgcaggccaagcccgagaaggcagcagtggcccagaagccccgaagccacttcacgacacctgcccctatgtccagtgcctggaagacggtggcctgcggggggaccagggaccagcttttcatgcaggagaaagcccggcagctcctgggccgcctgaagcccagccacacatctcggaccctcatcttgtcctgaggtgttgagggtgtcacgagcccattctcatgtttacaggggttgtgggggcagagggggtctgtgaatctgagagtcattcaggtgacctcctgcagggagccttctgccaccagcccctccccagactctcaggtggaggcaacagggccatgtgctgccctgttgccgagcccag

SEQ ID NO: 9405 - DNA, 297 bp, Homo sapiens
aaattccaaagcactcacaaaattgagcaaacaaagccactatttgcatatttgggaaaggaaacatattgctaatggaagccacaggactggtacacaggccccactccctccagctccattcccaagcacaaaattcaacagacccagatcctaagtcaaccaagtgactgctatgacaaaggcttgggttattgacatttacttacatacgtgtacaagacctagagtttgaaaataaatggagaattctaccccaaagcctccacctcagtgaagacctgcgggttattgcag

SEQ ID NO: 9406 - DNA, 342 bp, Homo sapiens; identical to SEQ ID NO: 306

SEQ ID NO: 9407 - DNA, 230 bp, Homo sapiens
ctggaggatcccggggcagggacacctagcccggtgcgtctgcatgccctggcagggttccagcagcgagccctgtgccacgcgctcactttcccttccctgcagcggctcgtctactccatgtgctccctctgccaggaggagaatgaagacatggtaccagatgcgctgcagcagaacccgggcgccttcaggctagctcccgccctgcctgcccggccccaccgagg

SEQ ID NO: 9408 - DNA, 512 bp, Homo sapiens
cctcctgctgtggactgctcttcttaggacaacactggctccacacaagtcagcgaggatggggtcatctttagtcaacatggtttcaggtgtaagttctcaggaagtgtttgttgaatgcatgagtggacaaaggggaggacaatgaaatgagacggaattccgtgtgtttcctgggcagttggtgcaggtgttcctctctcaggaatcacagcttgttaaaggtcatctgcctgctatggacaggggctcccatgactcgtctggaactgtatcacctcccaaagcctggtgatttcaggctcattcttggggtagacaccacctcctgagtcccttcctttggttaccctgctgtccaagggccccacgttggggtgcctactcacccaggtccatgtttcgagtccgggggttacactgcttgtaacccttgcagctcctcagctccatgagctgtacgtgtagctggttgaggacatccctgtccagtgtgttcactgcattcatca

SEQ ID NO: 9409 - DNA, 308 bp, Homo sapiens; identical to SEQ ID NO: 4688

SEQ ID NO: 9410 - DNA, 300 bp, Homo sapiens
aaaaagcaagttactgtccagccaggtagtcggacacggaccaaagctggcagaggaagaaggagaaaattctgaatttctagggtccaaaagttgacaaaaccattagtaggaggggtgggccatgttcattaagccatagtggtccctagttcattgttgagcaagttttagccctgcagttttcaccaccagcacctacccagcattctggtttttatgttttttatgatctatgcagacaactgtgtattctgttttataacagtttgtttgaatttacttacagttaaaaaattt

SEQ ID NO: 9411 - DNA, 75 bp, Homo sapiens
ccaggatctcggcgcatagaccactctgccccagcggtcgtcacagaaaggtctctctgttccccacactcagca

SEQ ID NO: 9412 - DNA, 335 bp, Homo sapiens
cctgatggctggaccctgctcactgctgttgtgggaccctgaaccctcccttcaccttgcttgcctcctgcctcggaagctccttgggtgtgggtgaagcccgaggctgctcctgtggaagtggctctgggcaccagcctgtggggctaaagacttgacagctagctctggagcagccggcttcctggaaaacctccaggtttcgcataccagggatggcccctggcttggcctgcgaaggtgaacctgcccagatttatcagtagaggctggactccctctgtgtcctgcccatggttgcagcagccatgggcctatgagcggtctaactgtgg

SEQ ID NO: 9413 - DNA, 551 bp, Homo sapiens
ccagccagtgacagaaaaaagagtgaatgtgcctttaagaagaagagcaatgagacacagtgtttcaacttcatccgtgtcctggtttcttacaatgtcacccatctctacacctgcggcaccttcgccttcagccctgcttgtaccttcattgaacttcaagattcctacctgttgcccatctcggaggacaaggtcatggagggaaaaggccaaagcccctttgaccccgctcacaagcatacggctgtcttggtggatgggatgctctattctggtactatgaacaacttcctgggcagtgagcccatcctgatgcgcacactgggatcccagcctgtcctcaagaccgacaacttcctccgctggctgcatcatgacgcctcctttgtggcagccatcccttcgacccaggtcgtctacttcttcttcgaggagacagccagcgagtttgacttctttgagaggctccacacatcgcgggtggctagagtctgcaagaatgacgtgggcggcgaaaagctgctgcagaagaagtggaccaccttcct

SEQ ID NO: 9414 - DNA, 134 bp, Homo sapiens
  unsure (85): n=A,T,C or G
  unsure (119): n=A,T,C or G
ccttgacaattaggcagggagaagacctggatgtccatcccatctgataccctgacttcccaagagaacaacccattcttctcanatttctcccaagtccctcattgctgggcctggangctcgctttggctcc

SEQ ID NO: 9415 - DNA, 210 bp, Homo sapiens
  unsure (170): n=A,T,C or G
  unsure (209): n=A,T,C or G
cctgggatgcagggagaaaggctgaccacaagttgagacaagatacagaaacaaacaaaaacaacagaaagtccgatcgatggtgtaagtgttgtgttcactgcttagggtgcaggtgagcttgatcgaggctcccagcaaggcagatgtagacgggggctgagtcagcncaggcagagcacagagacctgtggagaaaatgaagggcng

SEQ ID NO: 9416 - DNA, 206 bp, Homo sapiens
  unsure (174): n=A,T,C or G
  unsure (193): n=A,T,C or G
aaacttttgagttgtagtcagaaactgttgttggactgcatagttttcaaaagtttttggtacatttctgactttagaaatctggggtaggaatccctttccatatgcatatagactattttctgagcttcttcaaaacatgtttcagtgggttcctgaatgttcctgatgatngtctctcttgtcgaactgncaatgttaatctc

SEQ ID NO: 9417 - DNA, 188 bp, Homo sapiens
aaattcaccaacaactgggttcactgccaacaactacaaatgttcaattctgtattagtgtacatgtcattacagttggtttagatggttaatataggaataaataaaataactacagttcaaacaaaggaaattaaaatgagattaaagagccccgatcaaaaaaaaaaaatacttacaactttcag

SEQ ID NO: 9418 - DNA, 618 bp, Homo sapiens
  unsure (590): n=A,T,C or G
aaactgtaatagttctttatattcaggtaaattcctatacatgataggaatactttcgtcatctgatgcatcttcaacagcagtgttcatgtggctatgaaaacaagatcggtcatcatcttcatccatatacactggcggttcatgtgaagtcatgaaagtggaaggcttaaagagatgcttattaagagggtgctgtcgtctgcttgttgaagactttttggagtatatatataagtttggtgttctgcctggtactggaatgccagctttagttagctttatgaaatacttctgtactcggctggcaacctgttttgctgtcctgttgcccaattcatctgctatcttctgccagcgtcgagattctacttcttcaggagggtatttgatgagtagctgttccagctttttctgttcttcaacagtccacaactggttaaatgtttcaggtttggtatcatcacacaagcgtcctcttatcatctgaggacgactgcttgagccttctggaccatcactcaaaggcaacatagaatatgaaagggactctccatccttcttaggatctaaaggactttttggtctancaggtaaacctactttatcaaaaactgg

SEQ ID NO: 9419 - DNA, 259 bp, Homo sapiens
ctgtgtggtcctgagctgtcacctcttccctttgaagctcaggttcctcatcggtaaaatgaggcagaaatactcactgctgagatgtgtgaggatcgcacaaactcagtgtctcaacatgttgtacgtgtgttttggccctctgagcccttgagggctgccccaggtggaaccctcttcacttttcttggagaactgaccatgggttgcagcaaagcctaaaatggttcctgtttcagccctgcctgggaagattcag

SEQ ID NO: 9420 - DNA, 395 bp, Homo sapiens; identical to SEQ ID NO: 164

SEQ ID NO: 9421 - DNA, 464 bp, Homo sapiens
  unsure (15): n=A,T,C or G
  unsure (17): n=A,T,C or G
  unsure (19): n=A,T,C or G
  unsure (121): n=A,T,C or G
aaagatactggattntncnaagatttctgatttacactgatatttttttttgccattcttaattgcatcacacaatagatgtaaatgaagatgtagtcacctcagataaaattggtatcgngtatgataatattgtatcatttatatttgccttatgttaactttaagaaattgatttttttgtattaatcattttcccattgcaacagagctatattttttctattttaagaattatattttaggattatttttggcaaatacagtgagcacttatgtaaccagatgataatgaactcaaatgtcatgatggcttgcataaatggtgactctagtagatttgactcaagcacttctagaatcatgcactgaattcaaaagaaaaatcttgctgctttttgtccagggcttgttctattcaacttctaatttgaaagctgtacaaagtaatagaagttccattt

SEQ ID NO: 9422 - DNA, 347 bp, Homo sapiens
ctgggttggcacaggctttctccacttctgggcctacacagtccttcaagaacagaacatccttgcccagcagagatttgagttctacagcaactggctctaaggagtacttgtcaggcatgggcacaccatcaggccggcctaggtggctcataaggactaccgacttggctccattgtccaagcagaatttgatgcttgggacagcagccttaatcctctggttgtttgttatctggttgttcttcataggaacattgaagtcgactctcataacgacccgcttccctttaacgtccagcttgtccagcgtcagcttgttagaaagcgacattttggaaatacag

SEQ ID NO: 9423 - DNA, 310 bp, Homo sapiens
aaaggatggcctggcccccagtaaacgccgattcctgctcgcggccttctacgcccattactggagcagcagccatcagtgtagacgacgacgaagtctcccatgtaggaaaacgtgtctctgctaactggaggcgccggctccacgctcggcttcatgtgctttgcatacggctctgcgctttcatgtccatctccatccagtggctcacggagtcgcttgctggctttcgcctccgattcttgtccatgttgattttcatgcccttctgaaacttccgggcttgcagatttcctgacaaaggcccagg

SEQ ID NO: 9424 - DNA, 332 bp, Homo sapiens
ctgcgtggagtgacgggaggagggaatcactgtgtgtgcgagagtgcttcagactcaatttccaaaataattttcacccctctaagcatgtaaatatacaaagatggatccttcatagaaattaaaaaatcaatttgagctcatttcgaatacagaacaagtatggcacagatggaagtcctgccacgtttcctttaatgatgctgactcttgtatcacacaggccagcatgaagtttcttactcagactttacaggcattttccgtaattcaatcagtcctgctcccagcacaacacaggaggtgattcaagaataatcgcgagaatcagg

SEQ ID NO: 9425 - DNA, 332 bp, Homo sapiens
  unsure (10): n=A,T,C or G
  unsure (13): n=A,T,C or G
  unsure (14): n=A,T,C or G
aaagaactanttnntaaattatgacacaaaattttattaacaaggaaatatccattaattgactactacagtaaaaactttataatgcttgtatcatgaagaaagaccttccttttccttatatattaattgaactacataggcttgctgtacattttgttattcatgttataagaattctagattccattgcttttgaaatatgtttctttttaggaactaaaagtcaacttatagtttgatttctgttttatttgtactgtgtttctgattttgtgggtttctaaataaaaagatcaaacccaccactttcaatatactgttttctattt

SEQ ID NO: 9426 - DNA, 292 bp, Homo sapiens; identical to SEQ ID NO: 29

SEQ ID NO: 9427 - DNA, 299 bp, Homo sapiens
ctgtcagcaggaagaagtcagtctccactgcctccacagtctccactgccacgctgtcagccgtgggaacaataaaaagcagccccagaatgtgaagtcagtctccactgcctccacagtctccgctgccacgctgtcagccgtgggaacaataaaaagcagccccagaatgtttgctgctgtcgtgcatggacgacaccattgcacataaaagcactagtgctccattattgcagttgggcctcctgaaaacccctagagctggagagggcaagggagaggcttcctctgatcttcag

SEQ ID NO: 9428 - DNA, 377 bp, Homo sapiens
cgtccagcgagccgccgctggatgctaagtccgatgtcaccaaccagcttgtagattttcagtggaaactgggtatggctgtgagctcagacacttgcagatctcttaagtatccttacgttgcagtgatgctaaaagtggcagatcattcaggccaagtaaagaccaagtgctttgaaatgacgattccacagtttcagaatttctacagacagttcaaggaaattgctgcagttattgaaacggtgtgaagacggattctttggttgataaattgctatcattctaaagtcatggacttcactttcggcaacaaaactaaataaggatggaacatttattgaatgaaaaatgcacttttgtttttccattttttt

SEQ ID NO: 9429 - DNA, 487 bp, Homo sapiens; identical to SEQ ID NO: 6908

SEQ ID NO: 9430 - DNA, 409 bp, Homo sapiens
ctgcaccatccccgttgccacgggccgggaaaaaaccaacgacaccactgaagacaactccagttgcctctcaacagaatgcttcaagtgtttgtgaagaaaaacctatacctgctgaacgccaccgagggtcaagtcacagacaagaagctgtgcagtcaccagtgtttcctcctgcccagaaacaaatccaccaaaaacccatacctctgccaagatttacagaagggggaaacccaactgtggatgggcccctacccagcttttcatctaattccactatttcagaacaggaagctggcgttctctgcaagccatggtatgctggagcctgtgatcgaaagtctgctgaagaggcattgcacagatcaaacaaggatggatcatttcttattcggaaaagctctgg

SEQ ID NO: 9431 - DNA, 619 bp, Homo sapiens
  unsure (522): n=A,T,C or G
ctgggacttgctggtaccagggtcgccacacagcaagatgttgatctcagcccgaaatttgccccttccagtgtgactaaaatccttccttgtcccgccaaagagctgaagcaaaattcccttctttatatcttcatgttcataaatgcttggagccaaggctgaagcaagcctctcataaatgtctggtttcctggaaagttccttaagcaattccacacgtttctctgaaaaaagtttctgttctgcttcttcatcaaggccatgcagacgttttgcatccgttttccgataatgaatgacatcaatgtgggttttgtggacagacttcacattactcactcttggattgactcgaataggcacagctcgatagatgcctgtaacattcactctgtccccaggctggaccttgtcaacgagatcattgtgagcaaacaggataactgtgtgtggtgtctgccctgcaggcatgtcttccggagactcctgaagcttgatcatctgcttgtcagagaaganggagcggttgtggatgagtgccatgctgtgggtggtgtggcagcgcccgcacacactgggctctgcaatgcggccgcggtccatctccacccgggtc

SEQ ID NO: 9432 - DNA, 333 bp, Homo sapiens
  unsure (224): n=A,T,C or G
  unsure (290): n=A,T,C or G
ccaccctgactgccttctgccgctgagggcgccgctgggcctggcgcaacctgtgcactacccccacgtagcaccagcccatcaccagcatgggcagcaggaatcccgccacatggtagaggaatcgggaggtgaaccaggcatgcgtttctgcttggttctcttgggagaaggtgcaacgtggcagggagttgttgtgatggccttggctgactttggcgaanagaatctctggcaaggcaaggaggaagcccaccagccagatggtcccacaggtgatgtggatgganaggaggcggcggtggcggtaggcatggacggcgtggacaatgg

SEQ ID NO: 9433 - DNA, 476 bp, Homo sapiens
  unsure (16): n=A,T,C or G
  unsure (126): n=A,T,C or G
  unsure (147): n=A,T,C or G
  unsure (254): n=A,T,C or G
  unsure (266): n=A,T,C or G
  unsure (274): n=A,T,C or G
  unsure (277): n=A,T,C or G
  unsure (377): n=A,T,C or G
  unsure (441): n=A,T,C or G
  unsure (465): n=A,T,C or G
ccactaggaagcttanatccacacatacgcccacttcctggctcttggtttttccttgtccttgtttggtggccctttcaccttttcttttatgtttttgctgcttgcgatgttgaatacacctcntgagttttccctcaaatgcantttggaacaggatggctctggatgggctgatggatgatttctcctcccctttgtgttctggcctttctaggagggtgaggacaaaatcttcttaatcaacaagcttnactccatctacnagaggaanganagggaggagaggagcagggttgggacaaccgaggaggctgcggcaccccctgccctgctcacagatgaacaggatgcctagggggacggcgatgggcctnacgggcccgcccagcaccctgagaccacactgttgcctcccagtgaccctgctgggacaccagnacaaggaagacagtttcgcctctngaaagccgcag

SEQ ID NO: 9434 - DNA, 348 bp, Homo sapiens; identical to SEQ ID NO: 5566

SEQ ID NO: 9435 - DNA, 469 bp, Homo sapiens
ctggggagggggcctggtccatgtacgtggcgctgccgcccccggcatctgcagatgcgttcacaaactcagggaccacttgcttgatctgtggcttcacgtatccatcaacagctttagcagtagcagactcgcagggaactggtgtgtagtatttggagtatacttcatcttttggccgatcaggaaacacgtagataaggtaattcaagtctcccaagcggtcggctagggaccgaatggagaagtctctggtggtaaaaggcatcagattccaaaacattctttcctgagaatcaaacttccaagcaatggtgatgccgccaatttctgagtcactgaatctcaggaggaaggtcccatctggcttgttaatgagtaggtcatgggcctgttgcttgtttacaaaccccaaaatggccccatcattccaatgaggcttgagatgtttttttaacacttccatcac

SEQ ID NO: 9436 - DNA, 577 bp, Homo sapiens
aaacaaggttctcgaggcaaataaggaatcttgagaatccgtgggcatgcaatgtaacaagtagcactccagatggcgccaaagaataaataggcaggtctctatgataaaagaacaaagggaaagcagtttagctcgattgttgatcaccttcaccaagcgccgtcttgctagaacatatttctgagcagtggagattttatcaacaccagcaggcatcacagactgacacaactcttttatctcatctgggggaagctgctctacattttgtagcttgctgacactctgtcgatgactgtcataatagctgaagaaatcattagcactctgtttcagcaggtagatgataatgcctaaaccaggcaggcgccagtatggaaccactggagcttgggtatcttgccgcggtccatctctattaactgtttctgaaaggctaggagtgaagagacacacagcatgctggaaggtaggggaactctgtaacatgagtgactggcaatattccattacattggcacaaatctgctgcatagccagttcaatctcatctttcttgcttactttatcacct

SEQ ID NO: 9437 - DNA, 185 bp, Homo sapiens
aaatgttccaagtgctaaatttgcaagaaaacaggcactaatttcattgtcatcatctgggaagagttagtgtccaagggaagctcagcgggaagggagggaagtgaggtggggcagggtctggcgctcaggggtctgtggcattgatgatgcttttatccgggggggcccatcctcggtaccag

SEQ ID NO: 9438 - DNA, 271 bp, Homo sapiens
  unsure (184): n=A,T,C or G
  unsure (188): n=A,T,C or G
  unsure (206): n=A,T,C or G
  unsure (209): n=A,T,C or G
  unsure (214): n=A,T,C or G
  unsure (220): n=A,T,C or G
  unsure (225): n=A,T,C or G
  unsure (228): n=A,T,C or G
agggctgtgtagacggccaggttggctggggacccggagtagggctggacattgactccccactgtgcaggatccaggtcaaaggcttccaaggcccggcgctggcacagcagctcaatttcatccaccacctctgctcccccatagtatctcttgccaggataaccctccgagtacttgttgntcanacaggaccccagggcctncancgcanctcggntgcanaanttctctgaggcaatgagctccaggccacgacactggctgtcct

SEQ ID NO: 9439 - DNA, 150 bp, Homo sapiens
ccattcctgcagtgcctgtccttctcctttggcttatgctatcctcagcagcacatgcattatttgtaagcctcccttacccatttgatactacccaatcaagactctagtataaatgttctgtcccttcaagaaaccttccccagttgg

SEQ ID NO: 9440 - DNA, 210 bp, Homo sapiens
  unsure (38): n=A,T,C or G
  unsure (40): n=A,T,C or G
  unsure (75): n=A,T,C or G
  unsure (76): n=A,T,C or G
  unsure (79): n=A,T,C or G
  unsure (111): n=A,T,C or G
  unsure (125): n=A,T,C or G
  unsure (127): n=A,T,C or G
  unsure (138): n=A,T,C or G
  unsure (164): n=A,T,C or G
  unsure (191): n=A,T,C or G
gatccaacctctttgcatcttacaaagttaaacagctnanagaagtaaaataagaaggcaatgcttgtggaatgnncantgcatattggcggcgcacgcctcattacgatncgcctgcttgcttntnctgttcaatcnctgtgaccagaaaaaaaaaaaaaaangatggagggagatgattaaaggattcngtacagactaaagggcttt

SEQ ID NO: 9441 - DNA, 371 bp, Homo sapiens
ccaacatggtgaaaccctgtctccagtaaaaatacaaaaaatagctgggtgtggtggtgcatgcctataatcccagctactcaggaggctgaggcaggagaattgcttgaactcgggaagcagaggttgcagtgagccaagattgtgccactggactccagcctgggtgacagggcgagactctgtctcaaaaaaaaaaagggaaaagaaaatgtagatttccattgtccaaagtgacagcgggaggatgggtcttgagtttctcaggttggagaagcagctccacgaaggtcctgagcttgggtccactgtacatgggacagctccaaaagaggaaggtcccagcactgcatctagtagtgaggcatcag

SEQ ID NO: 9442 - DNA, 230 bp, Homo sapiens
ctgaaagtaaacagaatggattgccagttacatgtatgcctgcccagttccctttttatttgcagaagctgtgagttttgttcacaattaggttcctaggagcaaaaaacctcaaggattgatttattgttttcaactccaaggcacactgttaataaacgagcagggtgttttctctcttcctttctaatatatggagtttcgaagaataaaatatgagagcaatattt

SEQ ID NO: 9443 - DNA, 491 bp, Homo sapiens
  unsure (395): n=A,T,C or G
  unsure (439): n=A,T,C or G
  unsure (464): n=A,T,C or G
ctgagtcggaggacgagatgatccatcctgagggagtggcttccctgctgcctcctgactttcagagcagcctggagagaccagagctggagctcagcagacattcgcccagaaaaagctcctcaatttctgaagagaaaggtgactctgatgatgagaaaccaaggaaaggagaaagacgatcatctagggtcagacaggcaagagcagctaaactgtctgagggcagccaacctgctgaggaggaagaggatcaagaaacaccttccagaaacctaagggtcagagcagatcgaaatttgaaaacagaggaggaagaagaggaggaggaggaggaggaagaagatgatgaagaagaggaaggtgatgatgagggacaaaaatctagggaggcnccaatcctgaaagagtgtaaggaagaaggggaagagatacctanagtaaaaccagaggagatggtggangagagacccaaaacaagatcccaggaa

SEQ ID NO: 9444 - DNA, 530 bp, Homo sapiens
  unsure (424): n=A,T,C or G
  unsure (464): n=A,T,C or G
  unsure (485): n=A,T,C or G
  unsure (506): n=A,T,C or G
  unsure (512): n=A,T,C or G
aaaagatagagccacatggacagaaagatcaatattgccctttatagtggctgctgcggttgtagctccgagactatattggagggggtgaggaaggacaagggggccagcaggtgggggacagcggcagacccctcccccaccccgatgctttggtccaaacaccacctctgagggctcccttgcttgggcttctcccaagattcccatccaccctcagaggacacagctactgcctcaactgggaggattcggaaagcttcagaaggtcagaaggcattggtagagggttccgggggaggctgggactacctccccccggagtgtttgaaaagccaggctggttcaggttagatactgaggtggggatgccagagctccatgctgaggaacagggtagagggtgtgggcttctagcacccangggtctgcccccggcagtggggccgccagtagaaacgcantcgcttctggtaggtgtccangttgcgcttcaggcagaaggncacctncttgtcacaggcacacag

SEQ ID NO: 9445 - DNA, 193 bp, Homo sapiens; identical to SEQ ID NO: 166
  unsure (7): n=A,T,C or G
  unsure (67): n=A,T,C or G
  unsure (102): n=A,T,C or G
  unsure (111): n=A,T,C or G
  unsure (120): n=A,T,C or G
  unsure (129): n=A,T,C or G
  unsure (154): n=A,T,C or G
  unsure (172): n=A,T,C or G

SEQ ID NO: 9446 - DNA, 126 bp, Homo sapiens
aaaaagttttattgtgaaatatttatccatgagtacatataacatagatgtccagtttttcaagttacaaaaagcagacagccctccctttttttttttttttttttttttttttttttttttttt

SEQ ID NO: 9447 - DNA, 187 bp, Homo sapiens
aaattgaatcaaagacgtaagatatctctggaatctgaaagaattccaaaaaatagcacagagaaaccatttgaaagccaaatactttacattaaattggtttcacttgtcagactcccaattccataaaactggaaaatcaatttacccaggagtcagtgtattttactgtgggggaaattacttt

SEQ ID NO: 9448 - DNA, 278 bp, Homo sapiens
aaaaacacaatacttggttctaaccctggagatttcaacagggatgggaaggtaacagccatatacttttagagctgtataggttatcctgacacctctactgaaaaaaacccttgctctaacagcaattggcttcatactcttaaatgagctacctataattttaatacaaatccatgtcctaattctctttattatttttttgagacggggtcttgctccattgcccaggctggagtgcagtggtccgatcttggctcactgcaacctgcgcgttc

SEQ ID NO: 9449 - DNA, 231 bp, Homo sapiens
cctcggccgaggtgtgctttgcatttaggacacagcccggagccgcagaaggtcagcaggagcacgtctggcaccttcagtaccaggctgggtgagagagcccgagaggggggccgggggggcagtcagggccctgcttcgctgcctgggcccttgtagatggccttctccaggccgtccaccacctccctgtattccaggaacgattggtagtgtgtgcactcaaagcag

SEQ ID NO: 9450 - DNA, 332 bp, Homo sapiens
aaaatctgtttggggaacaactcataacttctttaagtaattgatgtcaaataatgcaccctgtacttctggagaacacagcattttcaaaattgctcttttcaatctaattatatcagaaaaatatcttcaagagcttagtatttcccaatttttgatcctgatcctggtaacctttcatcaagatccaagcttatgcatagggttctcatctagacccatctgaaattctatacaaatagggagacatattaaatacaaaggtctgtgtaaattgacttaattactattttacaatgaaaaggaattttattacatctttacatcatttt

SEQ ID NO: 9451 - DNA, 184 bp, Homo sapiens
  unsure (9): n=A,T,C or G
  unsure (10): n=A,T,C or G
  unsure (33): n=A,T,C or G
  unsure (36): n=A,T,C or G
aaagcaganntcacaaagcacattcccaaaccncanctccctgacaggagcttgtgacaccagtgtggcctaagaatgggggatttgacttttgaaagcagaggagggaatttcgggctggatcgcaatcaggacagtcagcatgcctgcagagcacctaggctgtgagaggatggggccaagg

SEQ ID NO: 9452 - DNA, 291 bp, Homo sapiens
ccttcacaacctacgaaactacagttcagatttgggaaagcagccgaaaaaggtgcctaaacgtcgccaggccgcccgagagctgtccattcagcgccgttctgccctcaatgtgaggctcttcctcagagacttctgctctgagttcctggagaactgttacaaccggctcatgggatcagtaaaggatcacctgcttcgggagaaagctcagcagcatgatgagacctattatatgtgggccttggctttcttcatggccttcaaccgagctgcctccttccggccagg

SEQ ID NO: 9453 - DNA, 519 bp, Homo sapiens
  unsure (433): n=A,T,C or G
  unsure (450): n=A,T,C or G
ctgacattatgactatataatgtagttagagacaatttttatcttgcttatagtaaaggttcagcctgccaattgtaaatcattctaatttggcaggcttatttttgacattggaaagggcagaaagcgatttgccccagtagtgtaataggagttatagaccagaggctgaaacccaaactatataaaaaggaattcagtggagggggctttgtaatctccattaatttgtgttgctacttccaggatcaccaaaaattacatgtaattttacatgttaaacacattgaaacataacctatgtttataaagcataacgggcttcccttccagaagctctcctgcttgtcatgaagtgagaacaatgaaaagtcatagcagatactcagtttaactctgtgtagaacctagtagtgtttgagctgttattcanatttgaattcagactgngtgttgtttgcttatggacactgcctgtcgttctgtcactgttaaattaatgagtctataagggttttc

SEQ ID NO: 9454 - DNA, 369 bp, Homo sapiens
aaaggtgctaaaatccattccatagctttgaagtgagaacttacagcccatctgaacagtgaggtttgtacccaggcatactctgaggagggcccaaaggcccagcccatctgggagggacaggcccggaggatggagacctcgcagcatgtgcaccctgcgcagacatttacagacacgcaactcagtctttctcacttggacaacctgttgtgcaaaaacactaggaatcttgaagtgagggagctctgtccacagctcccgtaatggcagggaggagagcagagcccaatgaaccttgagtgaaattaagtgctcgaataaccacataattaaattgtgcagatcagcagtcctagtctggaattt

SEQ ID NO: 9455 - DNA, 282 bp, Homo sapiens
aaagtcatgtataatatttcttgattgggaggaaatataattttatcatcatagttaacagatcttcaagagtaaaaaaaaaaaaagccatcttagtttaaggattagtttatagtgaaattgtaatttttaagaaagctgggcgttctataaaaaccttcaagaacttattaaaaattggtattttttaattctctagaaccacatagtagaatgaataacttgctaattttattcttaaaaacctcatgtttatgttttttgatttgtgtttgtatattt

SEQ ID NO: 9456 - DNA, 258 bp, Homo sapiens
gaggagccgctgagcttgctggacgacatgaaccactgctactcccgcctgcgggaactggtacccggagtcccgagaggcactcagcttagccaggtggaaatcctacagcgcgtcatcgactacattctcgacctgcaggtagtcctggccgagccagcccctggaccccctgatggcccccaccttcccatccagacagccgagctcgctccggaacttgtcatctccaacgacaaaaggagcttttgccactga

SEQ ID NO: 9457 - DNA, 272 bp, Homo sapiens
ctgaccccggcgttcgacctcagccaggatccggacttcctgactatcgccatccgcgtgccctacgcccgggtctccgagttcgacgtctacttcgaggggtctgacttcaagttctacgccaagccatactttctcaggacttcatgagacctgtgttaaatctgcagattaacccttcctggaagaattgtagaaaatggaagtgagcaagggtcctatgatgcagataaaggaatttttaccattcgcctgcccaaagaaacccctgg

SEQ ID NO: 9458 - DNA, 325 bp, Homo sapiens
ctgctgaagactcagtctctcagagagctgtgctgatggagaagccagatgtggtagtagggaccccatctcgcatattaagccacttgcagcaagacagcctgaaacttcgtgactccctggagcttttggtggtggacgaagctgaccttcttttttcctttggctttgaagaagagctcaagagtctcctctggtaaggcagagtcacttgccccggatttaccaggcttttctcatgtcagctacttttaacgaggacgtacaagcactcaaggagctgatattacataacccggttacccttaagttacaggagtcccag

SEQ ID NO: 9459 - DNA, 235 bp, Homo sapiens
gcgacccagcccgcgagcgagatgccggtggccgtgggtccctacggacagtcccagccaagctgcttcgaccgtgtcaaaatgggcttcgtgatgggttgcgccgtgggcatggcggccggggcgctcttcggcaccttttcctgtctcaggatcggaatgcggggtcgagagctgatgggcggcattgggaaaaccatgatgcagagtggcggcacctttggcacattcatgg

SEQ ID NO: 9460 - DNA, 382 bp, Homo sapiens
  unsure (11): n=A,T,C or G
  unsure (72): n=A,T,C or G
  unsure (80): n=A,T,C or G
  unsure (89): n=A,T,C or G
  unsure (95): n=A,T,C or G
  unsure (122): n=A,T,C or G
  unsure (129): n=A,T,C or G
  unsure (131): n=A,T,C or G
  unsure (155): n=A,T,C or G
  unsure (173): n=A,T,C or G
  unsure (222): n=A,T,C or G
  unsure (235): n=A,T,C or G
  unsure (236): n=A,T,C or G
  unsure (237): n=A,T,C or G
  unsure (245): n=A,T,C or G
  unsure (251): n=A,T,C or G
  unsure (261): n=A,T,C or G
  unsure (305): n=A,T,C or G
  unsure (312): n=A,T,C or G
  unsure (321): n=A,T,C or G
  unsure (334): n=A,T,C or G
  unsure (352): n=A,T,C or G
  unsure (354): n=A,T,C or G
  unsure (373): n=A,T,C or G
  unsure (375): n=A,T,C or G
cctttctctanaagtcctgagactgagtactctccagaggctggaggttcgtgcggagtttgtacatgtggntgagcgcnatgtgtgangaaagncccgctggtgttgatctccatcaaggncaagttntncagcttggcatgtgcctcctgcgngtctcacaaagctgtcancagacactcggagtttggctatacgagtgtcccacatatccttgaccanggtccggatttcnnntgccttcnggatgntgtctgaagnatgatttaacaggagcttcgtaagttccatgtagtaagggctgngcattgnggtaaaagnttcttcctttcgntcatgatccctcatcttntncaacttttctacatccatncnctctgga

SEQ ID NO: 9461 - DNA, 228 bp, Homo sapiens
ccaggctggtctcaaactcttgacctcaggtgatccacccacctcagcctcccaaagtgctgggattacaagcgtgagccactgcaccgggccacagagaaagtacctctccaccctgctctccgaccagacaccttgacagggcacaccgggcactcagaagacactgatgggcaacccccagcctgctaattccccagattgcaacaggctgggcttcagtggcag

SEQ ID NO: 9462 - DNA, 312 bp, Homo sapiens
ccattttcttccaataatctgtaggaatgatcaaggggtccacaccaaccctggatccttcaggaagcacactcaccagccagtcttcctgagttggtgtgtccttcagacccatcttcataagtgtccagttgctgtccatttgcttggcagcctggagaaagtagcgcccgtcagtccacatggctgcatgctcttctgtgatgatggctgtgcccgcagagccatcgaatccagagacaaaagcccgccgacagtcacatggagcaatatactcactctgatgagcatctcccgatgggatgatgtagg

SEQ ID NO: 9463 - DNA, 397 bp, Homo sapiens
  unsure (97): n=A,T,C or G
  unsure (368): n=A,T,C or G
cctggtcacaatagggaagcgggggtggctcctcccctagcctgcaggaagcccttggtagcccacttatccaccttctcctgggtgtgtggctcancagccaagtccttgtgcactgggttgggtcccagcatgagcctggtggcctggcgggccctggcaccatggagagcagcctgctgccagtgatggcctggatctccaagacggcctccagcactgtcatgcccttgaccagctagtgctggtacaggacctgggtaacaggcatgtccttgggcgtcactggctcaggggcagaggacgaggttgaggaggaagctggatacccctgtccatggtgggctggggctggaagggtggctcantggcctcgaagtgccgggaggactcccag

SEQ ID NO: 9464 - DNA, 275 bp, Homo sapiens
ccttcttggagcccctgggcaccccgggctactgtggggctgtgggcctgttacccccaggcgcagcagctccctccggctgggcccaggctccactcagtgacacggctcaagtctacatggagctgcagggcctggtggacccgcagatccagctacctctgttagccgcccgaaggtacaagttgcagaagcagcttgacagcctcacagccaggaccccatcagaaggggaggcagggactcagaggcaacaaaagctttcttccctccag

SEQ ID NO: 9465 - DNA, 282 bp, Homo sapiens
ccaggcggtacatattctggtgcttcttagcagccttctggaagagatctcgcaggtctgctttctgcggggcagaagtaaaggggtgaagagtagccctggccctccaggcagacaggaggcagagggggcacctcacccgacgactgtgacccccacatgggcagaggacacttactgtgtgggacccctccatcatggcctgcacaaaggctgtggactcgctggtacaggaacgcacagtctcagtccgcccctcccggaacattctggtcattgagg

SEQ ID NO: 9466 - DNA, 287 bp, Homo sapiens
aaaagacctgatggggagatgaacattgcatctggctgtccccgctttgtggctcattctgttttggagaatgccaagaacgcctacattaaagatgacactctgttcttgaaagtggccgtggacttaactgacctggaggatctctagtcactgttatggggtgataagaggacttcttggggccagaactgtggaggagagcacatttgattatcatattgacctggatttagactcaaagcacatttgtatttgcctttttccttaacgtttgaagtcagttt

SEQ ID NO: 9467 - DNA, 420 bp, Homo sapiens
  unsure (8): n=A,T,C or G
  unsure (71): n=A,T,C or G
  unsure (80): n=A,T,C or G
  unsure (118): n=A,T,C or G
  unsure (174): n=A,T,C or G
  unsure (193): n=A,T,C or G
  unsure (208): n=A,T,C or G
  unsure (209): n=A,T,C or G
  unsure (216): n=A,T,C or G
  unsure (223): n=A,T,C or G
  unsure (230): n=A,T,C or G
  unsure (231): n=A,T,C or G
  unsure (237): n=A,T,C or G
  unsure (260): n=A,T,C or G
  unsure (279): n=A,T,C or G
  unsure (280): n=A,T,C or G
  unsure (296): n=A,T,C or G
  unsure (303): n=A,T,C or G
  unsure (314): n=A,T,C or G
  unsure (354): n=A,T,C or G
  unsure (361): n=A,T,C or G
  unsure (371): n=A,T,C or G
  unsure (386): n=A,T,C or G
  unsure (391): n=A,T,C or G
  unsure (404): n=A,T,C or G
  unsure (414): n=A,T,C or G
ccatgatnccaaacaaccatatacactagttgtattctttaataagcgagtatataatattcctgtgcganttattgaancaacaaaacaatatgccttgggcagaaagaaaaatggngaagagtactttggaagtgttgctgaaatcatcaggaatcatcaacatagtccttnggttcttattgacagtcanaataacacaaaagannccaccanactgaantatgccnntaaagnttcataaagggggaaaaaaaagntcaataccattgcttcagnnactttcccaaagtttntcctttngagaaaaagtnccaaaacttcatattttggattatgaatcatccagtaatnaaatggnagatggagtnagctattgaagtggncatanatttctttttaanaagctcatgnggactt

SEQ ID NO: 9468 - DNA, 308 bp, Homo sapiens
  unsure (276): n=A,T,C or G
ccatttaccagactccgacacaatgggccaccaccagtgtgacagcaggacatcctaatatatggatcttgatttttaagtttcagtatctgaacttcgtaaattagtaacttttagctgggaaagtatagcatgaaaccagaggttctcagaatgactgtaagatagcttacatttcctctttttgcctttatctccccaactaaaatacaatggggaagaagtctgcctatgatctttgaatgagctttttaaggaagaaatattatatattgnttgttaaagtttattgaaataaagaatcattt

SEQ ID NO: 9469 - DNA, 358 bp, Homo sapiens
tcgaattctggtgaaaaaggaagaattgacccttgaaggaatcaaacagttttatattaatgttgagagagaggtaactgtctgattgttagacattattttaccttcttgtataagcactgtgctaaaattgcagacactaggaccatgtcttggtttttgcaataatgctagcagagtacacacaagaagaaaagtaacagcactagattgtaaagactggggtggacctctttcttaatgtccaatgtcctttgtcttaagatttggtgcaatatctcattagacctaacagaatgaagttaatttttataatttctacgttttgagactgggttatgagactggctaagactgg

SEQ ID NO: 9470 - DNA, 172 bp, Homo sapiens
  unsure (70): n=A,T,C or G
  unsure (113): n=A,T,C or G
cctgtgggcctagctacttgggaggctaaggtgggaggatcatctgatcctgggaggtcgaggctgcagngagctgtgatcatgcctggacaacagagtgagaccgtcacttncgctctttctcggccgccattttggctagggcaggttcggggactcggtccgaggcgct

SEQ ID NO: 9471 - DNA, 356 bp, Homo sapiens
ctgagcacaaataattttccagcgccagcacaggtgtgaaaggctcacagacagacacacgcaacatgacacacccatcacttcccaagtccccagcttccccaggaacacagggcttgggctccaggccctgggcagacgaacccacagacagggctcctggttgtcacagcttgttccttggagctctcaggctgccaagggcttcaacatggtggtggaccagggagagtccacggtatagcgtctagctgatttctgccagaggatggggagggaaagagcagacacacccttggttcccgaccctgaatgagggccagcctcagtcccccagcagaagagcaccaggtcgg

SEQ ID NO: 9472 - DNA, 373 bp, Homo sapiens; identical to SEQ ID NO: 167
  unsure (341): n=A,T,C or G

SEQ ID NO: 9473 - DNA, 374 bp, Homo sapiens; identical to SEQ ID NO: 5632

SEQ ID NO: 9474 - DNA, 172 bp, Homo sapiens
ctggccttcctgagacaggctccattcctgttccatttgccttcccggcagccttccctttagtgggtataggttttgacgttctgagttactttgtatcaaagagctaattaaaaatggtccttcaaaaacataaagaaaaacagcttgaaaaatgtacatttctattttt

SEQ ID NO: 9475 - DNA, 387 bp, Homo sapiens
ccttttttaagtgacctgtaactcatatcagtgaaaaagaacatgctataaaaagattccacaaagtgagagcattaagctcaaaggtcctgaggtaggtgtgtttgaggagctggtgtgtagctgctgtataagaagtcaacctccttattttcaggtacatttattattattttaaccccaagcagaattgcctagctgggtccctcacctttacacaatagtcataggatttgactgttatcaaaaagtaaatccactctcagaggccatagatttcctattactgaggttcttcaaaagaatatgtaatcaatttatatagtaattcctaaaaatgagattctaaaatatagtagcatgcagatgaagcatagctaatgcttt

SEQ ID NO: 9476 - DNA, 278 bp, Homo sapiens
ccaccagtgtgacagcaggacatcctaatatatggatcttgatttttaagtttcagtatctgaacttcgtaaattagtaacttttagctgggaaagtatagcatgaaaccagaggttctcagaatgactgtaagatagcttacatttcctctttttgcctttatctccccaactaaaatacaatggggaagaagtctgcctatgatctttgaatgagctttttaaggaagaaatattatatattgtttgttaaagtttattgaaataaagaatcattt

SEQ ID NO: 9477 - DNA, 543 bp, Homo sapiens
  unsure (436): n=A,T,C or G
  unsure (485): n=A,T,C or G
ctctgcactatgtcgggtggcctcctgaaggcgctgcgcagcgactcctgcgtggagctgagccagtaccgggaccagcacttccggggtgacaatgaagaacaagaaaaattactgaagaaaagctgtacgttatatgttggaaatctttctttttacacaactgaagaacaaatctatgaactcttcagcaaaagtggtgacataaagaaaatcattatgggtctggataaaatgaagaaaacagcatgtggattctgttttgtggaatattactcacgcgcagatgcggaaaacgccatgcggtacataaatgggacgcgtctggatgaccgaatcattcgcacagactgggacgcaggctttaaggagggcaggcaatacggccgtgggcgatctgggggccaggttcgggatgagtatcggcaggactacnatgctgggagaggaggctatggaaaactggcacagaaccagtgagtggngagagctctgtcagtgacaaacactcctttggcctgttgaatttgctgaagaacatca

SEQ ID NO: 9478 - DNA, 452 bp, Homo sapiens
ctgaaaagttccagcatattttgcgagtactcaacaccaacatcgatgggcggcggaaaatagcctttgccatcactgccattaagggtgtgggccgaagatatgctcatgtggtgttgaggaaagcagacattgacctcaccaagagggcgggagaactcactgaggatgaggtggaacgtgtgatcaccattatgcagaatccacgccagtacaagatcccagactggttcttgaacagacagaaggatgtaaaggatggaaaatacagccaggtcctagccaatggtctggacaacaagctccgtgaagacctggagcgactgaagaagattcgggcccatagagggctgcgtcacttctggggccttcgtgtccgaggccagcacaccaagaccactggccgccgtggccgcaccgtgggtgtgtccaagaagaaataagtctgtagg

SEQ ID NO: 9479 - DNA, 208 bp, Homo sapiens
cctggagcgtttgctgtgccaggaggcggcagctcttctgggcagagcctgtccccgccttccctcactcttcctcatcctgcttctcttttcctcgcagatgataaaaggaatctggcattctacacctggaccatttgattgttttattttggaattggtgtatatcatgaagccttgctgaactaagttttgtgtgtatatattt

SEQ ID NO: 9480 - DNA, 254 bp, Homo sapiens
gacattattacaccttattaaaacttcacccagatgtccagacaaagctccatctatgtattcttctgtatttgcaagctgcatgttcatgtagccatctacagataccagatagcccttgtactccattccccacttaagtttcaccatcactggctttcctgttagtccattgaggaaaggtttgggattgaggggtaaactcatcgtaaccacggccgaatgttgcaggctactctctgccgaccaggccg

SEQ ID NO: 9481 - DNA, 203 bp, Homo sapiens
  unsure (11): n=A,T,C or G
ctggaccccancacctggtgctcccgtgctgagcccccagaccagtcctttcggaccggctctcccggggatgccccggagaggccgccgctttgcgactttagtgaggggctttcagccccaatggacttctaccgctttaccgtcgagagtccaagcactgttacatcaagtggcggccaccatgaccctgcagggcttgg

SEQ ID NO: 9482 - DNA, 209 bp, Homo sapiens
  unsure (204): n=A,T,C or G
  unsure (206): n=A,T,C or G
gcttcgtggaggttggccgggtggcctatgtctcctttggacctcatgccggaaaattggtcgcgattgtagatgttattgatcagaacagggctttggtcgatggaccttgcactcaagtgaggagacaggccatgcctttcaagtgcatgcagctcactgatttcatcctcaagtttccgcacagtgcccaccagaagtatntncga

SEQ ID NO: 9483 - DNA, 334 bp, Homo sapiens
cctgcttcacttgcagataagtttattataattctccagaaatgtgcaggatgtgcattagcaaattgcactgtacttttcactccagcctgggtgacagagcaagactcccgtctcgggggcttaaaaaaaaaaaaatgctgtatctaaatgaatctgtgtaattgggcccagatgtgggtttgcccagtattagtagacaaggtctttgttcagacgattaggtgcctaactggcaaatgccttagtttcttaaaacgtattttctgatgtggctttacatttcaaaagtgaacttgattcaacctgagaaaactgattaaaaaattagttt

SEQ ID NO: 9484 - DNA, 243 bp, Homo sapiens
ccaccaagtaagaatggttggtgacaagacagaaggctaaaacaggaaggtaatcttgtgcacctgacaaatagaaagaataaaggatcaaaattgaaggcaggctataagagtatcaagaaattcttaaaaaccaaaaagtgatttggaagcacaaaacttacagttaatgctacccaatgtcatgatgggccaagaacattgtggcttcctaagttagaaaatgccatatgccaaaatttt

SEQ ID NO: 9485 - DNA, 466 bp, Homo sapiens; identical to SEQ ID NO: 169
  unsure (447): n=A,T,C or G
  unsure (451): n=A,T,C or G

SEQ ID NO: 9486 - DNA, 423 bp, Homo sapiens
  unsure (20): n=A,T,C or G
  unsure (34): n=A,T,C or G
  unsure (65): n=A,T,C or G
  unsure (102): n=A,T,C or G
  unsure (109): n=A,T,C or G
  unsure (122): n=A,T,C or G
  unsure (208): n=A,T,C or G
  unsure (221): n=A,T,C or G
  unsure (233): n=A,T,C or G
  unsure (243): n=A,T,C or G
  unsure (273): n=A,T,C or G
  unsure (277): n=A,T,C or G
  unsure (341): n=A,T,C or G
  unsure (344): n=A,T,C or G
  unsure (356): n=A,T,C or G
  unsure (369): n=A,T,C or G
  unsure (379): n=A,T,C or G
  unsure (397): n=A,T,C or G
  unsure (407): n=A,T,C or G
  unsure (419): n=A,T,C or G
aaaggtgtgtgtattctgtntgcatctccctgtnactgtgacacacctagatgtgtgttacttcnattaaaattctcaaatttaattttgatttgcttcagnagggacnatcgagcggccgnccgggcaggtccaatgtagctgatgtcgtgagcaaaggccagagggtcaaagtcaaagtgctgtccttcactgggaccaagaccancctgagcatgaangatgtggatcangagactgganaagatctaaacccaaatagacggcgaaatnttgncggggagaccaatgaggagacctcaatgcggaatcctgatagacccactcacttgtcccttgtnagngctcctgaagtngaggacgactcantggaacgcangcgcctcacccgaatctntgacccatanaagtgggagatnaaac

SEQ ID NO: 9487 - DNA, 429 bp, Homo sapiens; identical to SEQ ID NO: 170

SEQ ID NO: 9488 - DNA, 553 bp, Homo sapiens; identical to SEQ ID NO: 171
  unsure (542): n=A,T,C or G
  unsure (543): n=A,T,C or G

SEQ ID NO: 9489 - DNA, 319 bp, Homo sapiens
  unsure (56): n=A,T,C or G
  unsure (228): n=A,T,C or G
  unsure (239): n=A,T,C or G
  unsure (241): n=A,T,C or G
  unsure (292): n=A,T,C or G
aaagtcaatctaccattaaatatacttatcttaaaattcattttgttagaaaatanaattcactttgagatctacttcttcccatattggtttattattccaataaaattcctatattcttgaatatgttttttctttctagttctgaggtatttaatttattactgaactctcttccaaatgatacacatacttgaaaaataatgagaaagaacatcttctagttanaaagattctgntnctagtaacttcaacaacagttatggaaaagaatactggaagttatccagtnaaattataagatgaaaattactatttt

SEQ ID NO: 9490 - DNA, 308 bp, Homo sapiens; identical to SEQ ID NO: 4688

SEQ ID NO: 9491 - DNA, 274 bp, Homo sapiens
aaacaagacacccaaatcagcagcaaaggtacctggggtagtcactgagattttgaacactgggaatgggagggggaaagtccaaaaagtagaagttgggaagaaaagggaaggattgagggagacgctaggctctggaggacagagctgggccgcaggaggtggaagtaagccagtatggggggtacccctcctgactgctgttgcccgtattcccccagaccccagagagccccacggtttgttctgcagtccattccctattccccaaagg

SEQ ID NO: 9492 - DNA, 83 bp, Homo sapiens; identical to SEQ ID NO: 168
  unsure (32): n=A,T,C or G
  unsure (53): n=A,T,C or G

SEQ ID NO: 9493 - DNA, 320 bp, Homo sapiens
aaaagaattaaccattggaatgaatggcatggaaccaactaatcagaatggaagacagccctggcactggagtaggatcatagagaacttctgcttgcttggccttcagcttttaggtttttggatcatggagagtttaaggagtcctgggagagggccagggagcctgcagttgtagcagggctcagggctgtggctttttaccaaatggtacagaaatagacaaattataacccccacatggctgaatcagttcatactgaccagcatgacccaaacccttttatcctaaaggatctccccacgagagtgttttggac

SEQ ID NO: 9494 - DNA, 260 bp, Homo sapiens
  unsure (13): n=A,T,C or G
ctgtggcccccanggctaccctacacaacgccctccccaggcccccctaagctgctctcccttggaacctgcacagctctctgaaatggggcattttgttgggaccagtgacccctggcatggggaccacaccctggagcccggtgctggggacctcctgggcaccctgtccttcactcctttgccccagggacccaggctcatgctctgaactctggctgagaggatgctgctcaggagccagcacaggacaccaccac

SEQ ID NO: 9495 - DNA, 481 bp, Homo sapiens; identical to SEQ ID NO: 173
  unsure (11): n=A,T,C or G
  unsure (17): n=A,T,C or G
  unsure (74): n=A,T,C or G
  unsure (86): n=A,T,C or G
  unsure (122): n=A,T,C or G
  unsure (147): n=A,T,C or G
  unsure (154): n=A,T,C or G
  unsure (166): n=A,T,C or G
  unsure (179): n=A,T,C or G
  unsure (183): n=A,T,C or G
  unsure (221): n=A,T,C or G
  unsure (280): n=A,T,C or G
  unsure (396): n=A,T,C or G
  unsure (410): n=A,T,C or G

SEQ ID NO: 9496 - DNA, 110 bp, Homo sapiens; identical to SEQ ID NO: 174
  unsure (73): n=A,T,C or G
  unsure (99): n=A,T,C or G
  unsure (107): n=A,T,C or G

SEQ ID NO: 9497 - DNA, 430 bp, Homo sapiens
cctagagagtcatatgtctcagttcagaaatctatcgaagtggcagagctggaattcaaacacaagcagccgttctctgctattccaccctggtgtccaagcaacatggtagggcagaaggaagaggatcttacaaagagtaagggaaagggagaggggcagaggctgcttctcagagccaccaaaggacaaaataagacaggtgtgagcccagtggaggaggcacggggcagagaccagccactgttgctggcacgctggtgcacgtagcactgtggcagatggacctggagaggaagcaggagggacagcacaatggagccaagaaaggacttagcatggccgggcgcggtggttcatgcctgtaatcccagcattttgggaggccaaggtgggcagatcacctgaggtcaggagtttgagaccagcc

SEQ ID NO: 9498 - DNA, 403 bp, Homo sapiens
  unsure (291): n=A,T,C or G
  unsure (315): n=A,T,C or G
  unsure (318): n=A,T,C or G
  unsure (356): n=A,T,C or G
  unsure (385): n=A,T,C or G
aaaaaatggtatttcagtatacagtcatccctcgtcatcagcggtgtgtggggcggcgggggcggttccagaacccttcccagatactagaatctgcagatggttaagtcctgcagttggccctgtggaatctgtggattagacaagttggccctccctatctgcaggttccacatccttgaatactctgttttccatctgaagttggttgaagccatggatatggagggctgactgtcgttggttttgttttttttttttttgatagacttcattttttttttttatggnaatattaggtgcatagcaaaatanagnggaatccaagagagttcccatatacttccagtcccctnacacacaagcctccccaactaccagcagnctgcaccagagtggtaca

SEQ ID NO: 9499 - DNA, 530 bp, Homo sapiens
ctggttccgccctatgcggactctgcccatggaacccggccctggaggctcagagggacggggaccagaggaccagggtccccccttggtgtggactgagattgcccccatccggccggaatccagtgattcaggactgggcgaaggagactctaagaggaggcgcgtgtccccctatccttccagtggtgacagctcctcccctgctggggccccttctccttttgataaggaagctggaggacagttttataactattttcccaactgagcagatgacatgatgaaaggaacagaaacagtgttattaggttggaggacaccgactaatttgggaaacggatgaaggactgagaaggcccccgctccctctggcccttctctgtttagtagttggttggggaagtggggctcaagaaggattttggggttcaccagatgcttcctggcccacgatgaaacctgagaggggtgtccccttgccccatcctctgccctaactacagtcgtttacctggtgctgcgtcttg

SEQ ID NO: 9500 - DNA, 146 bp, Homo sapiens; identical to SEQ ID NO: 338
  unsure (20): n=A,T,C or G
  unsure (26): n=A,T,C or G
  unsure (39): n=A,T,C or G
  unsure (46): n=A,T,C or G
  unsure (133): n=A,T,C or G
  unsure (145): n=A,T,C or G

SEQ ID NO: 9501 - DNA, 304 bp, Homo sapiens
cctcaggaaacttacagtcatgacagaaggggaggcaggcatgtcccacatggtggagcaggaggaagagctcacctacagcaaattatttaagaccgagcatttgtctctgttctgttccctctctggacgcaccctcctgcctccaccctgacttgccgtctcctgagcactgaagatatttttggcttgtccgatgtgactccacagacagcagaaacgcttgcttgatcagggcagcatcagggcaccacacatgcctgggcttgcacaacacagtgggagcactgccactcagcagcag

SEQ ID NO: 9502 - DNA, 312 bp, Homo sapiens
aaaaatcctatattaatccttttataagtgaacagtcacttaaaaatctcagctttcataattgggttgattaagtaacttatatctgctgtataataaacatagcgatcacagactatcctttttttccatattttataactctgaaactgagctctttactgttgattatccaaatcttttgccttttttctattagcaccctgcccatttcactactctaatcagccaatcaagagataaaatgagtctgggcttggtggctcatgcctgtaatctcagtactttgggaaaccgaggcaagtggatcag

SEQ ID NO: 9503 - DNA, 421 bp, Homo sapiens; identical to SEQ ID NO: 172
  unsure (342): n=A,T,C or G
  unsure (344): n=A,T,C or G
  unsure (353): n=A,T,C or G
  unsure (391): n=A,T,C or G
  unsure (396): n=A,T,C or G
  unsure (417): n=A,T,C or G

SEQ ID NO: 9504 - DNA, 427 bp, Homo sapiens
  unsure (11): n=A,T,C or G
  unsure (26): n=A,T,C or G
  unsure (39): n=A,T,C or G
  unsure (40): n=A,T,C or G
  unsure (76): n=A,T,C or G
  unsure (93): n=A,T,C or G
  unsure (102): n=A,T,C or G
  unsure (103): n=A,T,C or G
  unsure (112): n=A,T,C or G
  unsure (122): n=A,T,C or G
  unsure (123): n=A,T,C or G
  unsure (124): n=A,T,C or G
  unsure (136): n=A,T,C or G
  unsure (141): n=A,T,C or G
  unsure (143): n=A,T,C or G
  unsure (151): n=A,T,C or G
  unsure (164): n=A,T,C or G
  unsure (197): n=A,T,C or G
  unsure (219): n=A,T,C or G
  unsure (248): n=A,T,C or G
  unsure (271): n=A,T,C or G
  unsure (272): n=A,T,C or G
  unsure (327): n=A,T,C or G
  unsure (376): n=A,T,C or G
  unsure (420): n=A,T,C or G
  unsure (422): n=A,T,C or G
ccttgcctcanatccaaggtcactcngaagaggccatgnntaccctcaatgacactcatggaggaaatgctgaganaagcattcagatgcatnacacaaggnnagactgccnaaaatcttgnnncttgctctcctnatttngntatttgtnttatttttagganttttgagagcaaaatgacaacacccagaaattnagtaaatgggactttcccggcngagccaatgaaaggccctattgctatgcnatctggtccaaaaccactcttcnngaggatgtcttcactggtgggccccacgcaaagcttcttcatgagggaatctaanactttgggggctgtccagattatgaatgggctcttccacattgccctgnggggtcttctgatgatcccagcagggatctatgcacccatctgngngactg

SEQ ID NO: 9505 - DNA, 350 bp, Homo sapiens
  unsure (18): n=A,T,C or G
  unsure (30): n=A,T,C or G
  unsure (55): n=A,T,C or G
  unsure (87): n=A,T,C or G
  unsure (100): n=A,T,C or G
  unsure (105): n=A,T,C or G
  unsure (133): n=A,T,C or G
  unsure (222): n=A,T,C or G
  unsure (236): n=A,T,C or G
  unsure (303): n=A,T,C or G
ctgggaacaactttcttnaaactacctggnggtgaacttaacccaggagaagatnaagttgaaggactaaaacgcttaatgacaganatactgggtcgtnagganggagttttgcaagactgggtcattgacnattgcattggtaactggtggagaccaaattttgaacctcctcagtatccatatattcctgcacatattacaaagcctaaggaacataanaagttgtttctggntcagcttcaagaaaaagccttgtttgcagtccctaaaaattacaagctggtagctgcaccattgttngaattgtatgacaatgcaccaggatatggacccatcatttctagtct

SEQ ID NO: 9506 - DNA, 343 bp, Homo sapiens
ctgtcttccacggtacctgaactgggtctgattttttgaaacattttggaaaagagattgcgtttggaatgtttacatttcatgtgacaacatgaaaacaataaactgaaatgtcacctgaatgtgtagtaggagtctccctgtgtttaagtaactggtgtatcaaattgaatacttaagactgacactgttaaagtacccttgactgcaatagaatttgatggaagatctcagggaagtggaacaaaatcttgtatgaaaaataaggaagtagaaagaaggtctaagtctgaatttcatcccaggggttttcccttttctgaaatgttaagggctcctttgg

SEQ ID NO: 9507 - DNA, 237 bp, Homo sapiens
ccttggcggggctggcacctctgtgtcatgggagactctgtcccaggctctctccctgctgctgggctttgccggccgtctctgctgctcttggcttatggaagcagcaccatcttcacagggcgttctccccacgtgctgtctgtgcccagattcccccttttcatgaggacagcagtcatattggatcagaggcttgcgctactccagggtgacctcatctgaacttgattgcag

SEQ ID NO: 9508 - DNA, 432 bp, Homo sapiens
aaatgtatatggttaaacagccaatttagggaagaggaaataacactatatccagacaagcatgggtgtgtccgggacctgttagaagaatgtaaaaaggccgtggagcttggggagaaagcatcagggaaacttaggctgctagaaattgtaagctacaaaatcattggtgttcatcaagaagatgaactattagaatgtttatctcctgcaacgagccggacgtttcgaatagaggaaatccctttggaccaggtggacatagacaaagagaatgagatgcttgtcacagtggcgcatttccacaaaggggtcttcggaacgttcggaatcccgtttttgctgaggatacaccagggcgagcattttcgagaagtgatgaagcgaatccagagcctgctggacatccaggagaaggagtttgagaagttt

SEQ ID NO: 9509 - DNA, 552 bp, Homo sapiens
  unsure (33): n=A,T,C or G
  unsure (180): n=A,T,C or G
  unsure (353): n=A,T,C or G
  unsure (393): n=A,T,C or G
  unsure (394): n=A,T,C or G
  unsure (420): n=A,T,C or G
  unsure (518): n=A,T,C or G
cctggtctgagcaagggcagccccctgtcccanacacaggcacccccaatctcactttggacagagccaacgtggggggatcctcccgggcctgggcctgtcaagtctgcctgcgggaccctgccattgtgctcaaatcacaaccattttgtgcttccaacatttagggtgcttgtgcantgagtggagctgggggcctgccccctaacatggaccttggacatccctgaaagagtgggcagagaatccaactctcatgaagcacaactcggggtgtctcatggatgttgggctcagggctcctgaaggacttcaagtttagagagtcaatgacacttgccaggacagcaganctggccccgccgtgaggtagctgacccatcagaaacagcnnaaaatgggcatgatgatgagcacctntcgcagggccataagatcacacttcgtgcaagaacacgccttgcagctacagtgcagtcaccccaggtggggcatccccggcccgggggtgggagctnaaggggacagagtcttacgtgtttctatcgcttg

SEQ ID NO: 9510 - DNA, 252 bp, Homo sapiens
cggggtgatcatggacgcttgacaacctgcgggcaggcgccgggaggccgagccagcgactaagaggaccgagaggtggcgtggacagatttcaaggccagagaatggcaggggaacagaaaccctcaagtaatctcctggagcagtttattttactagccaaaggtaccagtggctcagccctcactgctctcataagccaggtcttagaggctcccggagtgtatgtctttggagaacttctggagctgg

SEQ ID NO: 9511 - DNA, 438 bp, Homo sapiens
  unsure (29): n=A,T,C or G
  unsure (413): n=A,T,C or G
  unsure (419): n=A,T,C or G
  unsure (420): n=A,T,C or G
ccacctccccatatcctgagactgacagngttttttttgagccttcccatctgacatctgctgctgatgaaggtgctgttcaagtcagtagaagaaccatttcttcgaattccttctcaccagaggtatttgtgctgcctgttgatgtagaaaaggaaaatgcccacttttatgttgcagatatgattatatcagcaatggagaaaatgaagtgtaacattctgagtcaacagcagacagagagctggagtaaagaagtcagtgggttacttgggagtgatcagcctgactctgaaatgacttttgataccaacataaagcaagagtctgggtcttctacttcttcatacagtggctatgaaggttgtgctgtgttacaggtcagcccagtgactgaaacacgtacttaccantgatgnngcctaatgagtgagctaa

SEQ ID NO: 9512 - DNA, 395 bp, Homo sapiens; identical to SEQ ID NO: 339
  unsure (12): n=A,T,C or G
  unsure (16): n=A,T,C or G
  unsure (21): n=A,T,C or G
  unsure (50): n=A,T,C or G
  unsure (57): n=A,T,C or G
  unsure (76): n=A,T,C or G
  unsure (120): n=A,T,C or G
  unsure (126): n=A,T,C or G
  unsure (142): n=A,T,C or G
  unsure (164): n=A,T,C or G
  unsure (166): n=A,T,C or G
  unsure (173): n=A,T,C or G
  unsure (184): n=A,T,C or G
  unsure (190): n=A,T,C or G
  unsure (218): n=A,T,C or G
  unsure (221): n=A,T,C or G
  unsure (238): n=A,T,C or G
  unsure (276): n=A,T,C or G
  unsure (298): n=A,T,C or G
  unsure (307): n=A,T,C or G
  unsure (326): n=A,T,C or G
  unsure (344): n=A,T,C or G
  unsure (349): n=A,T,C or G
  unsure (358): n=A,T,C or G

SEQ ID NO: 9513 - DNA, 372 bp, Homo sapiens; identical to SEQ ID NO: 175

SEQ ID NO: 9514 - DNA, 292 bp, Homo sapiens
  unsure (170): n=A,T,C or G
  unsure (206): n=A,T,C or G
  unsure (275): n=A,T,C or G
ctgaccatgaaggacagcaaccagttccacgccacctgcctcgacaccttcccgcccatctcttacctcaatgccatctcctggcgcatcatccacctggtgcaccgcttcaacgcccaccacggggacaccaaggtggcgtacacctttgacgcgggccccaatgccgngatcctcaccctggacgacactgtggctgagtttgnggctgctgtgtggcacggctttcccccaggctcgaatggatacacgtttctgaaggggctgcaggtgangccggcccctctctcag

SEQ ID NO: 9515 - DNA, 373 bp, Homo sapiens; identical to SEQ ID NO: 176
  unsure (95): n=A,T,C or G

SEQ ID NO: 9516 - DNA, 247 bp, Homo sapiens
ctgccatgttcacatatcggtccctctcccttcagggtccacagagggaccctcagcggctttctcttctctgtcccagctccccagcagccacagcattcgccagggtgacctcggtcagacggcgccactcacccatcacgagactagaaccaccgcactcccaagacagccttgttccttggagctcaggatcagaagggcaacaaggacacacacatgcacttaccaaggtggctgtgcctgg

SEQ ID NO: 9517 - DNA, 146 bp, Homo sapiens
  unsure (21): n=A,T,C or G
  unsure (28): n=A,T,C or G
  unsure (46): n=A,T,C or G
  unsure (103): n=A,T,C or G
ttcagggatcttgaactgaanaaaatangtctgggaaagaacagtnctggctcaaatgtttcatgttcattaatctatgaaacctttattaaaccagtactgngtatcaggcacatgatttcctaaaggagaaattttaacatttt

SEQ ID NO: 9518 - DNA, 154 bp, Homo sapiens
ccttgttcaaaatccaagctgagggtggcactaattccaattagaatggcaagagtcatgccaaggaccagcaccctaagagtgtttctccccgcataccaaagcatcactgcaatgtgcagaagagctgataacggtaggattttgtaaccag

SEQ ID NO: 9519 - DNA, 329 bp, Homo sapiens
ccatggagaaggaggaaaaagagagtcccttctccagtgaagaggaagaagaagatgtgcctttggactcagatgtggaacaggccctgcagacctttgccaagacctcaggcaccatgaataactacccaacatggcgtcggactctgctgcgccgtgcgaaggaggaggagatgaagaggttctgcaaggcccagaccatccaacggcgactaaatgagattgaggctgccttgagggagctagaggccgagggcgtgaagctggagctggccttgaggcgccagagcagttccccagaacagcaaaagaaactatgggtaggacag

SEQ ID NO: 9520 - DNA, 126 bp, Homo sapiens
ccacttctgccacccccacccctttaagacactgaaacatgccggacagcagattcacaagtgaagagcaggaaacagggtttgaggatagtggttaaccatggctgcattcttctgggagccttt

SEQ ID NO: 9521 - DNA, 215 bp, Homo sapiens
ccagctctgtgggaactatacagggagctgggcctatttcagggcccagcactggggctgaggaaccatttgggaagaaaactaagaaggagaaaaaagaaaaaggcaaagagaacaacaaactggaaggtactttggggagatgatatcagttgccccagtgactcacctactaatgacagttagacctggtactaactgacagacacacacag

SEQ ID NO: 9522 - DNA, 122 bp, Homo sapiens
  unsure (90): n=A,T,C or G
  unsure (112): n=A,T,C or G
  unsure (115): n=A,T,C or G
gatattgttaggatctactagcaaatgatttggtaacctgacatctttgtattcatgtccaaaaaaattcttttataagaacaaaaatgntactcttagcctcattcactgnagnattactg

SEQ ID NO: 9523 - DNA, 286 bp, Homo sapiens
cctagaaaaatgcctggcacagaagcatttactaaatatttgttaaatggatgaataaactatgtgaccagaattccttaatactgggtccgagactagaaagtgggagttactggtttggttttggcacttgtttagtcagcttgtgctgccataacaaaacaccacagatggattggttaacaacagacatttctttctcacaattctggaccctggaaatctgaggttagggaaccagcagattcagttcctggtgagggccctcttcctgcctggcagacag

SEQ ID NO: 9524 - DNA, 518 bp, Homo sapiens
  unsure (496): n=A,T,C or G
aaaaataaagtctccctacttaaaatccagtagatatcatggcactaatgctaacacccctttccccaaattaataaaacaaaaataaaaaaaagaaaaagagaaaagagaaaagcaaggtggttagccctccctcctgaaaaaaaccttacaatggtagtgctggaaaaggaagttgcccttgattaaaaaggtaacaaaattcccacattgtacaaatcggttccagtatagcaagaggtgagggctagggcagaggagcaaactatgtacaaggacccattgaaaacgcagtagtaggactttggcactatgaacaattcccaccggtcctctgggaggtgcgtctgagagtcgctggacttcccgcaccctccaggcacacgcgagctaagtagttccacttggagtcactggcaagggtggcccatggctggggagagaccatctcttctttcttcaaagacggagcgtcccgttgatcagcacagcagtnctaacagacttccctgtctagg

SEQ ID NO: 9525 - DNA, 226 bp, Homo sapiens
ccccctagaggtgtccctgtgcctgtctgctgtccaaggcaagtgccacacacagccttggagttaccccagtgtgtgtctttcctctctgaggctgtcggtgctgatgacaacactgggacccataggtcccagcaactccctgagtgacacatcccctcctgtgcagtgtggcagaggagtgctgagttggcttggacctgtccaacctcgtctggcctcattt

SEQ ID NO: 9526 - DNA, 274 bp, Homo sapiens
ctgattgccaggtgaacatcaccatcttactcctctgaataactagacacaaattacatagcaagttcgagtttctgcccacccaagacacagccagtaatcagtcacaaacacagacacagccaactccaggggctccagctttctgcccatcttctctcagcagttcctcccatctgctaagatgcgccttcctggtggctctctctcaaggtgggtcaaggctgaacaagacagaaaagcacagtctaggtccaccatcacctcccactgg

SEQ ID NO: 9527 - DNA, 376 bp, Homo sapiens
ccaaaggcagctctggcatgctcaaaccctccaacctgtagccgcttcttgaagaggtccagcggatatgtcagggtcttgctgatgacaccagctccactgccacaaagcaggttttggaggttctcatttttctttccttcggctggtatggcccacttgtacaggtgcttcaaggagctgtagcaagagaactgcagcccggcgtaggggaagatggcgatcaaggtgggagccaagcctttgtagaaaacctgggggccttcgctcctatacatggtccccacggcgtggcgcagcgtattatagaccttgggctcaccctgagctgcaaagcgggtgcgcagaacatccacggggtgcacagtgagggtgg

SEQ ID NO: 9528 - DNA, 220 bp, Homo sapiens
ctgggggatgttactgccttgtgccagttccccaagctcgaggaactcagcctggagggcaaccccttcctgacggtcaatgacaacctgaaagtctcctttctcctgcccacgctccgtaaggtcaatggcaaggatgcgtcctcaacttactctcaggtggagaacctgaatcgggagctgaccagcagggtcacagctcaccgggagaagttcatgg

SEQ ID NO: 9529 - DNA, 425 bp, Homo sapiens
  unsure (10): n=A,T,C or G
  unsure (12): n=A,T,C or G
  unsure (94): n=A,T,C or G
  unsure (173): n=A,T,C or G
  unsure (348): n=A,T,C or G
  unsure (382): n=A,T,C or G
gaggtagggntngcaatgagctccacccttcagccatgtcctgcaaccttccccgggcccatagtgagggtgccaccttactcccagcctccangggctctgcctgctcctgccctgtcccccgcatcctatgaggcatgggcgtgggtgggcacagcatactgtgcgtgtgngtgtccgtcacaccttgctcgggacggaaagattcccacacaggaataaggacccgtggccctcatgggggaaggacagaggcactacaggtcacctcatcccctctcctgcctccatggcacacgtcaccctccccaggccacttccaagtcactcagagttgtgggacagagngaagctctctgcatggcgtttccttggctatggnttgcagaggctgcaaactccaatgagctacagtttgggggcag

SEQ ID NO: 9530 - DNA, 450 bp, Homo sapiens
  unsure (11): n=A,T,C or G
  unsure (18): n=A,T,C or G
  unsure (21): n=A,T,C or G
  unsure (36): n=A,T,C or G
  unsure (86): n=A,T,C or G
  unsure (122): n=A,T,C or G
  unsure (123): n=A,T,C or G
  unsure (132): n=A,T,C or G
  unsure (139): n=A,T,C or G
  unsure (143): n=A,T,C or G
  unsure (151): n=A,T,C or G
  unsure (155): n=A,T,C or G
  unsure (156): n=A,T,C or G
  unsure (190): n=A,T,C or G
  unsure (198): n=A,T,C or G
  unsure (199): n=A,T,C or G
  unsure (219): n=A,T,C or G
  unsure (345): n=A,T,C or G
  unsure (351): n=A,T,C or G
  unsure (357): n=A,T,C or G
  unsure (397): n=A,T,C or G
  unsure (399): n=A,T,C or G
  unsure (428): n=A,T,C or G
  unsure (431): n=A,T,C or G
  unsure (432): n=A,T,C or G
  unsure (439): n=A,T,C or G
ccttgcctcanatccaangtnactcggaagaggccntgtctaccctcaatgacactcatggaggaaatgctgagagaagcattcanatgcatgacacaaggtaagactgccaaaaatcttgnncttgctctnctcattntgtnatttgttntatnnttaggagttttgagagcaaaatgacaacacccanaaattcanntaaatgggactttcccggcngagccaatgaaaggccctattgctatgcaatctggtccaaaaccactcttcaggaggatgtcttcactggtgggccccacgcaaagcttcttcatgagggaatctaagactttgggggctgtccanattatnaatggnctcttccacattgccctggggggtcttctgatgatcccancngggatctatgcacccatctgtgtgactgngtnntaccctntctggggaggc

SEQ ID NO: 9531 - DNA, 242 bp, Homo sapiens
  unsure (40): n=A,T,C or G
ccagcaatctgcctgagcagttcgactgtgccatcaacanccgcattgacgtgatggtccacttcgacctgccgcagcaggaggagcgggagcgcctggtgagactgcattttgacaactgtgttcttaagccggccacagaaggaaaacggcgcctgaagctggcccagtttgactacgggaggaagtgctcggaggtcgctcggctgacggagggcatgtcgggccgggagatcgctcag

SEQ ID NO: 9532 - DNA, 271 bp, Homo sapiens
aaagtttgctgtgtttgtaaccagtgtgtgttgagaaggaccaacaccaaaccaccctggggaagggggacagggaaacatttaacacagacgatgatcaggatttgccccaaaccaccccaagagagaggactgagtggaacaaaaaagtgacccccagaacctctcttagtgtgagggtgggtagaatgagaactgacacctgggagctgtggggagcagagcggctttggggaagagtggagtgactagacacctaatgccctggcag

SEQ ID NO: 9533 - DNA, 373 bp, Homo sapiens; identical to SEQ ID NO: 177

SEQ ID NO: 9534 - DNA, 409 bp, Homo sapiens
tcgggagggaggaaggtggcaagatggtgttggaaagcactatggtgtgtgtggacaacagtgagtatatgcggaatggagacttcttacccaccaggctgcaggcccagcaggatgctgtcaacatagtttgtcattcaaagacccgcagcaaccctgagaacaacgtgggccttatcacactggctaatgactgtgaagtgctgaccacactcaccccagacactggccgtatcctgtccaagctacatactgtccaacccaagggcaagatcaccttctgcacgggcatccgcgtggcccatctggctctgaagcaccgacaaggcaagaatcacaagatgcgcatcattgcctttgtgggaagcccagtggaggacaatgagaaggatgtgagtccaagtggcag

SEQ ID NO: 9535 - DNA, 396 bp, Homo sapiens
ctgctgggggaagcagcttgttcaatgggagaactgggctgtgaagtctgaccagactgggctcaaaccccctctctgccacattctagcaaggcgtttaggctttgagcctcagtgttgccacctgtgaaacgggtgacactatgtcacagactgcagggtgaggttgtggaaacgcccagcatggaccgggacacaggcggcgctccatgaagcttccttggctccctctctaggtggtggtcagcgtccctcagaggatcatggcccgtcacctccaccccatccagacaagcttccaggaggctacagcctccaaagtgattgttgccgtgggagacagaagctctaacctgagaggcgagtgcacccccacccagagggaagtcatccagg

SEQ ID NO: 9536 - DNA, 155 bp, Homo sapiens
aaatgttcatttaacttagttttgtttagctagttaaaacacactagcatttgtctagtttcctcatctggatgaggaaacctgctgtgatggcagtgataaaatttttccttttaggaattttgcaaataaaccactgcaattatagacacttt

SEQ ID NO: 9537 - DNA, 613 bp, Homo sapiens
ctgaggcttggaaacgtttcttgtgttgccctgaaaaatctttgagacctcagggaggctctgtctctcttaaaaggtggagaaagatgccattctctccctaaggtctggtggagtctccccatcttgcatacccttctgcaagccatctatctctgctcactctccaattgacccgcctgggaacaagggatgaggaggagttgggggctggggggaatcctgccagttggtgaagccctgtggcaggaaggtatatgtggacatagagtatacctgactctctttcttcagccactgactgcttgggttgggctgtgaatgataatggaatggctggagtctgctgttgtcagaaggcagggagggtgatgaaggactgacccacatggactgggatgtgtgtcggttatgggcatgactgcacgttcactctcagtgggatctgggcaacatggagttcattgtcctgttgcttacttactgcaatgtctttggccctccttttcaactggttcctctgttgggcccaaaggttgggagtaggagacagtatcccaggctgacaagggcttgccctttaccttgggcaccttgttaatttttagcctgt

SEQ ID NO: 9538 - DNA, 422 bp, Homo sapiens
ccaggggagggctccatggttctttagcacaggctgtggcctcacacactccagtctccatggtaacccaagcactcaggctattatgtcccacacctcctcgctggcctgcttctgtcaactctacgctggtagaagatctcggcattagctgtctggggaagctaacttcctacagtgggttttagttgagttaatcaccactggtgtaaaacgcttgtgcatcttaggaacccaaatcttccccaaattctagacaatcccacaaaatgctagtatctaggtttagatctaggtcctgtcttccgtttgaagccttcagggtaaaggagggcagagataaggctctctcctggggaaaggagttctacacaaaaatgacctcagaatgggggccattagcctcaagcatctgtgtgagg

SEQ ID NO: 9539 - DNA, 362 bp, Homo sapiens; identical to SEQ ID NO: 6999

SEQ ID NO: 9540 - DNA, 336 bp, Homo sapiens
aaaattacaattgaagtaaaataatgtgtcttatttcagtataaaggatcatttgaaactgttgattccaaacatcaactaatattatatagtcatcagtagaattataaggatgccatatcatgacattttagaagtggagagtgcatcatatgtagaaaataaatattcagacgtggctcattaatgttactaagttggaagtgagaatttatgaacattaattcattttaagaaaagtgcagccaggcgcagtggctcatgcctgtaatcctagcactttgggaggccaaagtgggcagatcacctgaggtcaggagttcaagaccagcctgg

SEQ ID NO: 9541 - DNA, 490 bp, Homo sapiens
ccagcaaacttgaggctcctttcactcaggatgacacccttggactggaaaactcacacccggtctggacacagaaagagaaccaacagctcatcaaggaagtggatgccaaaactactcatggaattctacagaaaccagtggaggctgacaccgacctcctgggggatgcaagcccagcctttgggagtggcagctccagcgagtctggcccaggtgccctggctgacctggattgctcaagctcttcccagagcccaggaagttctgagaaccaaatggtgtctccaggaaaagtgtctggcagccctgagcaagccgtggaggaaaaccttagttcctattccttagacagaagagtgacacccgcctctgagaccctagaagacccttgcaggacagagtcccagcacaaagcggagactccgcacggagccgaggaagaatgcaaagcggagactccgcacggagccgaggaggaatgccggca

SEQ ID NO: 9542 - DNA, 526 bp, Homo sapiens
aaacatcatccttgtcttgtgaagaaaacaggaagaatgtcatgtaccatgtggatcaccttcagttcaaagttgcagcaaagtgaagaaagaaactactggaagccacccagcaatgcactgtttagtcatcaattaggagcccatgggaggataatagggagactgggtggaggctcagtgtgtaataatctcttgtctaatgtatgtgtgtcactgccatgttgtatgaacaatagtgagggctcacatttacttaacacttgtgtgcgcaaatctgggttcttcttcctttccagaactatgactcgatcataaaatctgttttgtttgcatgcatgcccaaaacaaccctgtaagtagaacattgtcattatctctgttttagagatgaggaaacaggctcagagaagctcagaaatttgttcaagatcgcacagctagtaaatggcagaagtaggattgtgaacccagggaatctccagagcctctgtgtaaccatgatgttatattttttttcctcttt

SEQ ID NO: 9543 - DNA, 327 bp, Homo sapiens; identical to SEQ ID NO: 179
  unsure (321): n=A,T,C or G

SEQ ID NO: 9544 - DNA, 192 bp, Homo sapiens; identical to SEQ ID NO: 180
  unsure (31): n=A,T,C or G
  unsure (106): n=A,T,C or G
  unsure (119): n=A,T,C or G
  unsure (120): n=A,T,C or G
  unsure (136): n=A,T,C or G
  unsure (144): n=A,T,C or G
  unsure (155): n=A,T,C or G
  unsure (183): n=A,T,C or G

SEQ ID NO: 9545 - DNA, 171 bp, Homo sapiens; identical to SEQ ID NO: 181
  unsure (86): n=A,T,C or G
  unsure (120): n=A,T,C or G
  unsure (122): n=A,T,C or G
  unsure (154): n=A,T,C or G
  unsure (155): n=A,T,C or G
  unsure (160): n=A,T,C or G
  unsure (167): n=A,T,C or G

SEQ ID NO: 9546 - DNA, 318 bp, Homo sapiens
aaagaaattggagatattgctggtgttgctgatgttacaatcagacagtcctatagactgatctatcctcgagccccagatctgtttcctacagacttcaaatttgacaccccagtggacaaactaccacagctataaattgaggcagctaacgtcaaattcttgaatacaaaactttgcctgttgtacatagcctatacaaaatgctgggttgagcctttcatgaggaaaaacaaaagacatggtacgcattccagggctgaatactattgcttggcattctgtatgtatatactagtgaaacatatttaatgattt

SEQ ID NO: 9547 - DNA, 301 bp, Homo sapiens
aaagaaggggacaaagctgaaccagccacttggaagacgaggttacgctgtgctttgaataagagcccagattttgaggaagtgacggaccggtcccaactggacatttccgagccatacaaagtttaccgaattgttcctgaggaagagcaaaaatgcaaactaggcgtggcaactgctggctgcgtgaatgaagttacagagatggagtgcggtcgctctgaaatcgacgagctgatcaaggagccttctgtggacgattacatggggatgatcaaaaggagcccttccccgccggagg

SEQ ID NO: 9548 - DNA, 136 bp, Homo sapiens; identical to SEQ ID NO: 178
  unsure (100): n=A,T,C or G

SEQ ID NO: 9549 - DNA, 220 bp, Homo sapiens
cctgggatgcagggagaaaggctgaccacaagttgagacaagatacagaaacaaacaaaaacagcagaaagtccgatcgatggtgtaagtgttgtgttcactgcttagggtgcaggtgagcttgatcgaggctcccagtaaggcagatgtagacgggggctgagtcagcacaggcagagcacagagacctgtggagaaaatgaagggcagtaggtagaag

SEQ ID NO: 9550 - DNA, 373 bp, Homo sapiens; identical to SEQ ID NO: 182

SEQ ID NO: 9551 - DNA, 181 bp, Homo sapiens
ggcctgggcaggtttcatggtcctgctgatgatcccatggggctctgctgcaaaactggtctgctacttcaccaactgggcccagtacagacagggggaggctcgcttcctgcccaaggacttggaccccagcctttgcacccacctcatctacgccttcgctggcatgaccaaccaccag

SEQ ID NO: 9552 - DNA, 297 bp, Homo sapiens
ctggagcccttccctgagaaactcttacaggccaggaagccagtacagacctttgagaggtctgtgtacagtgacaggtatatctttgcaaagaatctttttgaaaatggttccctcagtgacatcgagtggcatatctatcaggactggcattcttttctcctgtgggagtttgccagccggatcacattacatggcttcatctacctccaggcttctccccaggtttgtttgaagagactgtaccagagggccagggaggaggggaaaggaattgagctggcctatctagagcag

SEQ ID NO: 9553 - DNA, 583 bp, Homo sapiens
ctgtgcattctctcctgactcttctatgctgtgttcagtcggagccagtaaagcagttttcctttggaatatggataaatacaccatgatacggaaactagaaggacatcaccatgatgtggtagcttgtgacttttctcctgatggagcattactggctactgcatcttatgatactcgagtatatatctgggatccacataatggagacattctgatggaatttgggcacctgtttcccccacctactccaatatttgctggaggagcaaatgaccggtgggtacgatctgtatcttttagccatgatggactgcatgttgcaagccttgctgatgataaaatggtgaggttctggagaattgatgaggattatccagtgcaagttgcacctttgagcaatggtctttgctgtgccttctctactgatggcagtgttttagctgctgggacacatgacggaagtgtgtatttttgggccactccacggcaggtccctagcctgcaacatttatgtcgcatgtcaatccgaagagtgatgcccacccaagaagttcaggagctgccgattccttccaagctt

SEQ ID NO: 9554 - DNA, 498 bp, Homo sapiens
  unsure (20): n=A,T,C or G
  unsure (21): n=A,T,C or G
  unsure (28): n=A,T,C or G
  unsure (82): n=A,T,C or G
  unsure (97): n=A,T,C or G
  unsure (102): n=A,T,C or G
  unsure (108): n=A,T,C or G
  unsure (127): n=A,T,C or G
  unsure (137): n=A,T,C or G
  unsure (160): n=A,T,C or G
  unsure (166): n=A,T,C or G
  unsure (172): n=A,T,C or G
  unsure (184): n=A,T,C or G
  unsure (208): n=A,T,C or G
  unsure (210): n=A,T,C or G
  unsure (220): n=A,T,C or G
  unsure (234): n=A,T,C or G
  unsure (252): n=A,T,C or G
  unsure (272): n=A,T,C or G
  unsure (275): n=A,T,C or G
  unsure (314): n=A,T,C or G
  unsure (338): n=A,T,C or G
  unsure (345): n=A,T,C or G
  unsure (353): n=A,T,C or G
  unsure (354): n=A,T,C or G
  unsure (372): n=A,T,C or G
  unsure (449): n=A,T,C or G
  unsure (486): n=A,T,C or G
ctgtgaactgcttgttagcnntcttcanggtgcctttcgagaaataatacaccttgttcacttcaataagaggaaagaactngtccacttgctcatngaaanctgtanctcggatttcaccactttngtcaaccagntctagggagaaaagcttcccttnccctcnggagtngctccaggtacngatctgacttttgttggtaacacnancacaaatggnccacttggactggnaaggagtgaggctggcantgggcaccactttggactgngtncccccagaagtgtgtgacaggctgggacctgcagctttnccaaatgtctttgaagcaccatangccttanaaacagtnnaacccattcccgagcttncattctgcggctggggcctgctgcttgctgctgggctggctgctggcgctggaggagctacttgcggctgcccgagnccttcattatagggcactggattgccaatcttcactncaactgcttcag

SEQ ID NO: 9555 - DNA, 585 bp, Homo sapiens; identical to SEQ ID NO: 183

SEQ ID NO: 9556 - DNA, 349 bp, Homo sapiens; identical to SEQ ID NO: 640

SEQ ID NO: 9557 - DNA, 127 bp, Homo sapiens
ctgtatcaaatgaaccgagttggaggaaattgtataggagtatatcttaatggcactacagcaaactgtgttaaatttgggtttttggcaaagattgaagaaaactggtattcaagatgtactgcag

SEQ ID NO: 9558 - DNA, 389 bp, Homo sapiens
aaaggaaaaaaaaagttcagtcagaagttgaatgtccccataaggagtaacagaggtcattcctgattaatctaatttaatctttataattcaaggatcctcccagccaaaacaatctcaggtatccgattttatgcaattcattttgtgagtaacatcacagaaggattgagtaggatactggtttaaccatgggcataacattttttttttcagtattgaagagtaaagctaaagtttgttcactaagatgtttaattcaagccccagtaacagagatacacaactgccaaagtcagctcttaggggtgttgtaccaggaggtggtgtaaacagatctggacccagagaattagaaagaaaaggcagaatgaagttcacaacagcag

SEQ ID NO: 9559 - DNA, 337 bp, Homo sapiens
ctggctgatgtctgcttggacactccactctgtaatgggcacaccacagggatggatgtcctctgggcagggacccccatggtgaccatgccaggagagactcttgcttctcgagttgcagcatcccagctcacttgcttaggttgtcttgagcttattgctaaaaacagacaagaatatgaagacatagctgtgaagctgggaactgatctagaatacctgaagaaagttcgtggcaaagtctggaagcaaagaatatctagccctctgttcaacaccaaacaatacacaatggaactagagcggctctatctacagatgtgggagcattatgcag

SEQ ID NO: 9560 - DNA, 584 bp, Homo sapiens
  unsure (569): n=A,T,C or G
aaaagttataataataaatacccacacatgtaattatacattctaggctgggagtgggggctcacacctggaatcccagcactttgggaggccgaggccggtggatcacctgaggtcattgggagttcgagaccagcctgaccaacatggagaatccctgtctctactaaaaatacaaagttagccaggcatggtggcacatacctgtaatcccagctacttgggaggctgaggcaggagaatcacttgaacccgggaggtggaggtagtggtgagccgagattgtgccattgcactccagcctgggcaacaaaagcgaaactccgtctcaaaaaaaagttacacattcgttcctattatccttgccgtaaataaatgtgacaaagctgaggctgatcctgagaaagtgaaaaaagagctgctggcttacgatgtggtatgtgaagattatggaggtgatgttcaagcagtgcctgtctccgcacttacgggcgataatctgatggctttggcagaagcaacagttgctcttgcagaaatgttagaattgaaagcagatcccaatggtncagtggaaggaacag

SEQ ID NO: 9561 - DNA, 255 bp, Homo sapiens
cctggatcccggcctttccctgtgacttacgtgtctgtcaccggcaggcagccctacaaatcctggtgacctgctctcccaagaacagagcctgtccccagatgtcccagtagcgatgagtaacagaggtggctgtggacttcctctacttctccttgctggatcagggccttcctgcctcccgctgggcaggtctggccttgctctcttggcagggccccagcccctctgaccactctgcagctcaccatgcag

SEQ ID NO: 9562 - DNA, 357 bp, Homo sapiens
aaatacacagacgggcgagtggcgcccgtgtcgatgtcttcagccagtggtgaccctgcttttgtaaccgcgtcaacctgacaaaacctcagcagcagaagtccctatttttctaggagttcatcgtgcagacagtcttcactacaggactcggccctggggcctctgcctctcgtctgaccttgcagccttagtcgttggaggctggagcgcaatggccctgccgtctgtggagcctctgggcggccttctttcctttctgtcaacctctcatttcacagaaaaaggctgaatttcattttttccagcatgaaagccaggatcggttagtggttggattctattggtttttttttt

SEQ ID NO: 9563 - DNA, 155 bp, Homo sapiens; identical to SEQ ID NO: 184
  unsure (46): n=A,T,C or G
  unsure (52): n=A,T,C or G
  unsure (67): n=A,T,C or G
  unsure (108): n=A,T,C or G
  unsure (114): n=A,T,C or G
  unsure (117): n=A,T,C or G
  unsure (128): n=A,T,C or G
  unsure (130): n=A,T,C or G

SEQ ID NO: 9564 - DNA, 248 bp, Homo sapiens
aaaaatgttagagctgttttacaattattttcacttccctagctttctgagcctgtaagtctctcttccctatttcaacattcatcctaaagagttttcaattagtatgtgaaaccaaaaggtcagagtgttttagtctgatacaaatcatccctaactaaaatgattccagtatgtgcttccatttcattaaaactgttctgtgaaaatttggatatcctcaggaatgcattattacagaataattt

SEQ ID NO: 9565 - DNA, 257 bp, Homo sapiens
gtgaaatcatacaggaagtgggaaaactctatccactggagatagtatttggaatgaatggaagaatatgggttaaggcaaaaaccatccagcagactttaattttggcaaacattttagaagcttgtgaacacatgacgtcagatcaaagaaaacagatcttctccagattggcagaaagttgatataggtggacttttttacaggtcagttgaggcaaaaaactatgggttttttcaggtgaacctcccccattt

SEQ ID NO: 9566 - DNA, 119 bp, Homo sapiens; identical to SEQ ID NO: 185
  unsure (10): n=A,T,C or G
  unsure (60): n=A,T,C or G
  unsure (78): n=A,T,C or G

SEQ ID NO: 9567 - DNA, 579 bp, Homo sapiens; identical to SEQ ID NO: 340

SEQ ID NO: 9568 - DNA, 460 bp, Homo sapiens
ctgtgccaggctgtcaagttcctccatgataacaagctgacacatacagacctcaagcctgaaaatattctgtttgtgaattcagactatgagctcacctacaacctagagaagaagcgagatgagcgcagtgtgaagagcacagctgtgcgggtggtagactttggcagtgccacctttgaccatgagcaccatagcaccattgtctccactcgccattaccgagcaccagaagtcatccttgagttgggctggtcacagccttgtgatgtgtggagtataggctgcatcatctttgaatactatgtgggattcaccctcttccagacccatgacaacagagagcatctagccatgatggaaaggatcttgggtcctatcccttcccggatgatccgaaagacaagaaagcagaaatatttttaccggggtcgcctggattgggatgagaacacatcag

SEQ ID NO: 9569 - DNA, 449 bp, Homo sapiens
aaaccgtagttggcgcagaggtcagtcctagtcggagcttaggaggggcggagacgctcacatcgtctgacttgagtcgccactgattgtggcaacagctttgcctcatgagtcaaaaattggcaatttcttttgatttttagttgttgaatttgctgtttcaagcatttgtacatattagaagtctaaggagtagcaagtcagtgggaggactttttcacccctggcattagcagcttcgacctcattttccagatgcaccagctcctattaataagttagcaaggaaagtgtatgtcacgtgcaggaacagtgaggcagggacaggggttctgctccttctcacttcaccaccggcacacggcttgcccctgtctttgcccccaaaggtattttgtgtctagtgtcacattggagctattcttcactggtccttaaccttgggtttt

SEQ ID NO: 9570 - DNA, 101 bp, Homo sapiens; identical to SEQ ID NO: 186
  unsure (14): n=A,T,C or G
  unsure (23): n=A,T,C or G
  unsure (36): n=A,T,C or G
  unsure (48): n=A,T,C or G
  unsure (72): n=A,T,C or G
  unsure (84): n=A,T,C or G
  unsure (89): n=A,T,C or G
  unsure (90): n=A,T,C or G

SEQ ID NO: 9571 - DNA, 84 bp, Homo sapiens; identical to SEQ ID NO: 188
  unsure (32): n=A,T,C or G
  unsure (53): n=A,T,C or G
  unsure (58): n=A,T,C or G
  unsure (74): n=A,T,C or G

SEQ ID NO: 9572 - DNA, 307 bp, Homo sapiens
ctggggagagctaaaggactttgatgtgtaactgtgctgttgatgaagtcctcccagggaagcctgtgcagatgcagtcacctggaaagaacagagattaccctttcacctacctcagcaaaacaaactttcaagtcttgatagacttagcctagtaattttatagtgagagtttcaaactatatatcagtgtctatagcatcaaaaacttctgggggcgtgggggaagtagaataccaagtataatagttacattcactttcaaagagcatctatgaatttgccttttgtaacttactgtggcttt

SEQ ID NO: 9573 - DNA, 139 bp, Homo sapiens; identical to SEQ ID NO: 189
  unsure (24): n=A,T,C or G
  unsure (27): n=A,T,C or G
  unsure (113): n=A,T,C or G

SEQ ID NO: 9574 - DNA, 283 bp, Homo sapiens; identical to SEQ ID NO: 190
  unsure (211): n=A,T,C or G
  unsure (268): n=A,T,C or G
  unsure (280): n=A,T,C or G

SEQ ID NO: 9575 - DNA, 178 bp, Homo sapiens
aaaacagaaaaaatgcaaaactagggaagagaaccctagatattcactagggaaggtaccaaaatttccagaatcaaaaattccatcttctactggatgagtaaggtccaaattaaacctccaggttgacctcttgggcttcctgtctttctgcggcgccatcttgcgagtcggccgc

SEQ ID NO: 9576 - DNA, 261 bp, Homo sapiens
ccagcccgaagtcgacccctcagtcttgcttggatcatgccagccttcacccatctttgtgccctgaggtcttgggtgccaagggcagggcatcacagtcctctggctagctcccttctgagttggagctccctcaggagccccgcccaccctaagtgctggtctccacaatgcacttgaggaacattgtgtcgtccttcacgtaggcgtgcttgggtgactgcagtttgctgagggggaagaagagtgggcatccactgg

SEQ ID NO: 9577 - DNA, 224 bp, Homo sapiens
ccacctgaggacagcaccgctcacttcctcttgagggaacccttgctcttctccttgtctgctgaccgctgcttcttcactttctcctccctcttgttcttagtgtgcaggttctcatacacatcctccttgtgtctgcagccgggtgcaggggggcaagtacaggcagttggtgcaggtcaggagacagcacagggggacccggcactggcagtcccctctgg

SEQ ID NO: 9578 - DNA, 239 bp, Homo sapiens; identical to SEQ ID NO: 187

SEQ ID NO: 9579 - DNA, 307 bp, Homo sapiens
cctagggaaatccaccctcatcaacagcctcttcctcaccaacctctatgaggatcgccaggtgccagaggccagtggtaagaccctccccaccctcttgaggcagtagcccctgtccccaggttacaccctagtcttttccatctggggactcaggtagttgactgctttttttctgagactttcctcccctgggaaatgggtgcaggcaactgtgatattgacaaaggaaattaattctgcctcagagcctccccggatccctgacctctcccccatcccacagctcgcttgacacagaccctgg

SEQ ID NO: 9580 - DNA, 179 bp, Homo sapiens; identical to SEQ ID NO: 191
  unsure (13): n=A,T,C or G
  unsure (41): n=A,T,C or G
  unsure (42): n=A,T,C or G
  unsure (45): n=A,T,C or G
  unsure (65): n=A,T,C or G
  unsure (70): n=A,T,C or G
  unsure (113): n=A,T,C or G
  unsure (127): n=A,T,C or G
  unsure (153): n=A,T,C or G
  unsure (168): n=A,T,C or G

SEQ ID NO: 9581 - DNA, 280 bp, Homo sapiens
ccagtgtggcggctcatgcctgtaatcccaacactttgggagaccaacatgagaggaacacgtgaggccaggagttcaagaccagctcagcaacacagcaagaccctgtctctacaaaaaaataaaattagccaggcatagtggcatacacttgtagtcccagctactcaggaggctgagataggagaattgcttgagcccagaaggtcaaggctgcaggtgagccatgatctcgccattgtactccagcctgggtaacagaatgaaagcctgtctcttt

SEQ ID NO: 9582 - DNA, 54 bp, Homo sapiens; identical to SEQ ID NO: 195
  unsure (21): n=A,T,C or G
  unsure (44): n=A,T,C or G

SEQ ID NO: 9583 - DNA, 375 bp, Homo sapiens; identical to SEQ ID NO: 50

SEQ ID NO: 9584 - DNA, 130 bp, Homo sapiens; identical to SEQ ID NO: 197
  unsure (41): n=A,T,C or G
  unsure (42): n=A,T,C or G
  unsure (73): n=A,T,C or G
  unsure (92): n=A,T,C or G
  unsure (99): n=A,T,C or G
  unsure (111): n=A,T,C or G
  unsure (122): n=A,T,C or G
  unsure (123): n=A,T,C or G
  unsure (125): n=A,T,C or G

SEQ ID NO: 9585 - DNA, 464 bp, Homo sapiens
aaaagaaattggtaacatcactttctcagactcctctcctacatttctttaaccactgctcagcctcctttaccaagtcctttgactcttgtaaaatgttgatattcccagggttttctcaatggctttctttttattctacatcttctgcctcatggataagctcattgagatctatggctttgcctaataattataataaaagtattctaagcctgcattttcaaccagagttctatctccagctagaaatgcatataatccaattgcctactgaatgtatcccccatgaatgtttcattgaactcaacatgtgaagaaaactattggtctgtcccatgactgtttgcacttctctgttaacctgacaaattcctactccttccccatgagcattgtaaatccttgtgcacaatctgaaaacttatgagtgacctgagattttatctatcccctagcttttt

SEQ ID NO: 9586 - DNA, 90 bp, Homo sapiens; identical to SEQ ID NO: 192
  unsure (78): n=A,T,C or G

SEQ ID NO: 9587 - DNA, 585 bp, Homo sapiens; identical to SEQ ID NO: 183

SEQ ID NO: 9588 - DNA, 283 bp, Homo sapiens; identical to SEQ ID NO: 194

SEQ ID NO: 9589 - DNA, 191 bp, Homo sapiens; identical to SEQ ID NO: 198
  unsure (93): n=A,T,C or G
  unsure (96): n=A,T,C or G
  unsure (101): n=A,T,C or G
  unsure (182): n=A,T,C or G

SEQ ID NO: 9590 - DNA, 238 bp, Homo sapiens
ctgacaaagtagtattttagaaaagttctaaagttataaaaatgttttctgcagtaaaaaaaaagttctttgggccgggcggggtggctcacacctgtaatcccagcaccttgggaggctgaggtgggaggatcatttgaggccaggagtttgagacctgcctgggcaacataatgaaacttcctttccagggagaaaaaaaaaaaaaaaaaagctctgagagcatcttattttgttt

SEQ ID NO: 9591 - DNA, 424 bp, Homo sapiens
  unsure (230): n=A,T,C or G
  unsure (257): n=A,T,C or G
  unsure (281): n=A,T,C or G
  unsure (287): n=A,T,C or G
aaaaactccctatttatttttgttttttttttttcttcttttcctacgcaccattagccctaaaacgttgagagtaaacacttaccgaaagccgaccctggaccatgtgtctttagccatctcttggtgatgttgccaggaggatgggtcagtccaggagtggcagggcctaggtggcacctggaggtgaacacctaaccgcatgagtccttttccactgtcaggctacncggaaatactgttggtaggggggcgtntctgctgttggcagtgagaggtanaaactnggggttcttccttgctctcccctgacagacaaaaaagttcctcccccatggcttccaagctgtttccccctgtaagggaagctcgagagagagtctgctgttcagccatctgactgcttctaaatctgcttttcagg

SEQ ID NO: 9592 - DNA, 206 bp, Homo sapiens
  unsure (10): n=A,T,C or G
  unsure (29): n=A,T,C or G
  unsure (36): n=A,T,C or G
atttcatganacaagctggggaagtaacntttgcanatgcacaccgacctaaattaaatgaaggggtggttgagtttgcctcttatggtgacttaaagaatgctattgaaaaactttctggaaaggaaataaatgggagaaaaataaaattaattgaaggcagcaaaaggcacagtaggtcaagaagcaggtctcgatcccggacc

SEQ ID NO: 9593 - DNA, 290 bp, Homo sapiens
cctgtcacatgtggacctgtcacgtgtggactgtcacgtgtggacctgtcatgcatgcaccagtcacgtgtggacctgtcacgtgtgaacctgttgtgtggtcctgtcgtctgtgggcctgtcacgtgtggacgtgtcacgtgtggacccggctgaaggcaggatgcctcagccaatcctatgcctgggcagggcgggggatgcctctgcattttctgagccccatggccctgcagtgctgctgggtggctgtcacagacccaggccagcccctcctcccaggcaggcag

SEQ ID NO: 9594 - DNA, 282 bp, Homo sapiens; identical to SEQ ID NO: 199

SEQ ID NO: 9595 - DNA, 491 bp, Homo sapiens
aaagagaaacttaaatcctgttgtattctttcaacacaagcaatgatacttctcagagtctgctcaaaagctcagctctgtggactccgtgacaaaatgtacgcgtccactgccgaccctcttggtttctgaaaccaacctttcttcctgctctcctctttaagagcaaaccccaacatgtataaggtcacagcaagtggtagccagaaaaagctgtgggacccctcatttgagtcacatccatatggcatggagaaagaaaacctctctgccagaaggaactgaactctggaagtcctaaggaaggtcaccatgctcagcagataggaaagcattgccaagggctgtccctcaagagcttagttttcttagggagaccagaaagacatcagatcctgactgccctgttttgctcaagttctgaaatgagtggcatgatgaagagctggtggagctgagggaaagagtcaaccatgtggggtggggtagtg

SEQ ID NO: 9596 - DNA, 556 bp, Homo sapiens
  unsure (155): n=A,T,C or G
aaatcaactaaagactcatgagatttatttggttacagtgaataacctggacaaaatgttgagaagagttgttaaaacaagtttacattaaatatactaacaattacgtttggttacatatttgtaagtgatggttatttagaaaaactgcatanaaatccaaaccttaaatattctgcaaatcaaatcattagcttttctcttctctaataaagtagggtgactagttcttggattaatctaactataacattaatgtagcacttgattatcttatggaataattctctatctcatctaagcctcacaacaaccttgtaaagtattatccccattttatggaggaagaaacaggcttagaagtggaaaggtagattctctgctcgcacaaccgtattatgtggctaagctattgaacttgaacctagatttgggacttcatttcaaatatgaaattttttgattaaatctttttatcttgtatggaaaaaatatctcattagctgtcagatgttatttaccctgctaactgttaaaaatatttcattaaaaaaat

SEQ ID NO: 9597 - DNA, 261 bp, Homo sapiens
  unsure (35): n=A,T,C or G
  unsure (43): n=A,T,C or G
  unsure (57): n=A,T,C or G
  unsure (78): n=A,T,C or G
  unsure (84): n=A,T,C or G
  unsure (90): n=A,T,C or G
  unsure (102): n=A,T,C or G
  unsure (158): n=A,T,C or G
  unsure (229): n=A,T,C or G
  unsure (237): n=A,T,C or G
  unsure (241): n=A,T,C or G
  unsure (249): n=A,T,C or G
  unsure (252): n=A,T,C or G
aagctttttttttttttttttttttttttttttgngaaaatanctttatttcattgnggggagcgggccgatgtccancctcanaacttntggaactgcttnttggtgccggcagccttggtgaccttgagcacgttgaagcgcactgtcttgctcanaggccggcactcgcccactgtgacgatgtcaccgatctggacgtccctgaagcagggggacaggtgtacanacatgttnttgnggcgcttntcnaagcggttg

SEQ ID NO: 9598 - DNA, 622 bp, Homo sapiens
gcacacaaattgacttattagaaggcaatgtagcatcaggaaaagtagatgtgaatgaacagagtggtcagaggagaagttgtatttggttgaaccttgaaattaaaaatgatagaggaattattattgggaccgttgttaggaataatgacttttccactgcaagactgaagatatcagtgcccctctatattctgtgcaaaaggtgtctttgactcatccaaaaaattgaacagtttcctgtctcatggagatctatcacaaagtctttaaatattactacccatgaaattggccagggttaggacattcaaatgtctttatccacattcctgaaggataattgttatagattccctacctccataggaatgcttataatggattatctatacaatctccacattcccacattttgcattagagaatggaatcagtcaaaccctgttcccagagtttcccttagagttctcacctgttgtcttatatccatctaggaatccccatctctaatgtaagcttggagatccgggcccccgggggacaggtgactgaaggacaaaaactgatcctgctctgctcagtggctgagggtacaggaaatgtcacattctcctggtac

SEQ ID NO: 9599 - DNA, 523 bp, Homo sapiens
ctgtcatgaggtctcttctatagccatcaggtcttctcacagggatattcaccaccttgctctggataggcacatggccgttgtcagctctacagtaatatttgccggcatcactctctttcacagctgggatctccagctctgctgacagggaacgctgggttttctttcccatactggttcctgtggcctctctgtaccaggagaatgtgacatttcctgtacccccagccactgagcagagcaggatcagtttttgtccttcagtcacctgtcccccgggggcccggatctccaagcttacattagagatggggattcctagatggatataagacaacaggtgagaactctaagggaaactctgggaacagggtttgactgattccattctctaatgcaaaatgtgggaatgtggagattgtatagataatccattataagcattcctatggaggtagggaatctataacaattatccttcaggaatgtggataaagacatttgaatgtcctaaccctgg

SEQ ID NO: 9600 - DNA, 1908 bp, Homo sapiens
  misc_feature (1)...(1908): n = A,T,C or G
gacactcaacttcacagtgcctactggggccagaagcaatcatcttacctcaggagtcattgaggggctgctcagcacccttggnccagccaccgtggccttattattttgctacggcctcaaaagaaaaataggaagacgttcagccagggatccactcaggagccttcccagccctctaccccaagagttcacctacctcaactcacctaccccagggcagctacagcctatatatgaaaatgtgaatgttgtaagtggggatgaggtttattcactggcgtactataaccagccggagcaggaatcagtagcagcagaaaccctggggacacatatggaggacaagatgcagtcactgaacaggcagattcgctgacccttgtggcgccctcttctgtcttcgaaggagacagcatcgttctgaaatgccagggagaacagaactggaaaattcagaagatggcttaccataaggataacaaagagttatctgttttcaagaaaattctcagatttccttatccaaagtgcagttttaagtgacagtggtaactatttctgtagtaccaaaggacaactctttctctgggataaaacttcaaatatagtaaagattaaaagtccaaggaatccccatctctaatgtaagcttggagatccgggcccccgggggacaggtgactgaaggacaaaaactgatcctgctctgctcagtggctgggggtacaggaaatgtcacattctcctggtacagagaggccacaggaaccagtatgggaaagaaaacccagcgttccctgtcagcagagctggtagatcccagctgtgaaagagagtgatgccggcaaatattactgtagagctgacaacggccatgtgcctatccagagcaaggtggtgaatatccctgtgagaattccagtgtctcgccctgtcctcacccctcaggtctcctggggcccaggctgcagtgggggacctgctggagcttcactgtgaggcccctgagaggctctcccccaatcttgtaccaattttatcatgaggatgtcacccttgggaacagctcggcccctctggaggaggggcctccttcaacctctctttgactgcagaacattctggaaactactcctgtgaggccaacaacggcctgggggcccagtgcaggtggagggcagtgccaggtcctccatctcaggacctgatggctatagaaagagacctcatgacagctggagttctctggggacctgtttggtgtccttgcgttcactgggtgttgctttgctgttgtatgccttgttccacaagatatcaggagaaagttctgccactaatgaacccagaggggcttccaggccaaatcctcaagagttcacctattcaagcccaaccccagacatggaggagctgcagccacgtgtatgtcaatgtgggctctgtagatgtggatgtggtttattctcaggtctggagcatgcagcagccagaaagctcagcaaacatcaggacacttctggagaacaaggactcccaagtcatctactcttctgtgaagaaatcataacacttggaggaatcagaagggaagatcaacagcaaggatggggcatcattaagacttgctataaaaccttatgaaaatgcttgaggcttatcacctgccacagccagaacgtgcctcaggaggcacctcctgtcatttttgtcctgatgatgtttcttctccaatatcttcttttacctatcaatattcattgaactgctgctacatccagacactgtgcaaataaattatttctgctaccttctcttaagcaatcagtgtgtaaagatttgagggaagaatgaataagagatacaaggtctcaccttcatctactgtgaagtgatgagaacagg

SEQ ID NO: 9601 - DNA, 1329 bp, Homo sapiens
ccacgcgtccggtcctgaactgggctgaataaacatacctaaatatatgtttagaaatgctcctatgtatcagttttcccaggaacaactataatattatagaaatcttaaaattatttcctaataaaaaattataggatacaaaagaaaaaaaagaaatatgaagagggctggatgggcacaggaaaacaatcagatgagaacaacagatgaccgtgtctgcaggcagcacccagaactgatattcccctcaaacgtctaaatatattgttgagaaaattatctctaactgttctagtgggaatgtgggaatggaaaatatgcaacagccatggggccaggccctttgctgagcctgcaggttgggagtttgtgaatctattgaggcatcacaaatcttttctgatagcccctctgtgtctgtcagttccagtgtctcgccctgtcctcaccctcaggtctcctggggcccaggctgcagtgggggacctgctggagcttcactgtgaggccctgagaggctctcccccaatcttgtaccaattttatcatgaggatgtcacccttgggaacagctcggccccctctggaggaggggcctccttcaacctctctttgactgcagaacattctggaaactactcctgtgaggccaacaacggcctgggggcccagtgcagtgaggcagtgccagtctccatctcaggacctgatggctatagaagagacctcatgacagctggagttctctggggactgtttggtgtccttggtttcactggtgttgctttgctgttgtatgccttgttccacaagatatcaggagaaagttctgccactaatgaacccagaggggcttccaggccaaatcctcaagagttcacctattcaagcccaaccccagacatggaggagctgcagccagtgtatgtcaatgtgggctctgtagatgtggatgtggtttattctcaggtctggagcatgcagcagccagaaagctcagcaaacatcaggacacttctggagaacaaggactcccaagtcatctactcttctgtgaagaaatcataacacttggaggaatcagaagggaagatcaacagcaaggatggggcatcattaagacttgctataaaaccttatgaaaatgcttgaggcttatcacctgccacagccagaacgtgcctcaggaggcacctcctgtcatttttgtcctgatgatgtttcttctccaatatcttcttttacctatcaatattcattgaactgctgctacatccagacactgtgcaaataaattatttctgctaccttaaaaaaaaaaaaaaa

SEQ ID NO: 9602 - DNA, 1569 bp, Homo sapiens
  misc_feature (1)...(1569): n = A,T,C or G
tgctgccaaatgggacagcacacagcctgtgcacatactgacatgtgatgggtctccccacgggggctgcatttcacactcctccacctntctcaaactctaaggtcggcacttgacaccaaggtaacttctctcctgctcatgtgtcagtgtctacctgcccaagtaagtggctttcatacaccaagtcccaagttcttcccatcctaacagaagtaacccagcaagtcaaggccaggaggaccaggggtgcagacagaacacatactggaacacaggaggtgctcaattactatttgactgactganaaaaatgnntgantgattgaggaagaaaactgtgggtaatcaaactggcataaaatccagtgcactccctaggaaatccgggaggtattctggcttccctaagaaacaacggaagagaaggagcttggatgaggaaactgttcagcaagaggaagggcttctcacactttcatgtgcttgtggatcacctgaggatcctgtgaaaatacagatactgattcagtgggtctgcgtagagcctgagactgccattctaacatgttcccaggggatgctgatgctgctggccctgggactgcactgcatgcatgtgaagccctataggtctcagcagaggcccatggagagggaatgtgtggctctggctgcccagggcccaactcggttcacacggatcgtgctgctccctggccagcctttggccacagcaccaccagctgctgttgctgagagagcttcttctctgtgacatgttggctttcatcagccaccctgggaagcggaaagtagctgccactatctttgtttccccacctcaggcctcacactttcccatgaaaagggtgaatgtatataacctgagccctctccattcagagttgttctcccatctctgagcaatgggatgttctgttccgcttttatgatatccatcacatcttatcttgatctttgctcccagtggattgtacagtgatgacttttaagccccacggccctgaaataaaatccttccaagggcattggaagctcactccacctgaaccatggcttttcatgcttccaagtgtcagggccttgcccagatagacagggctgactctgctgccccaacctttcaaggaggaaaccagacacctgagacaggagcctgtatgcagcccagtgcagccttgcagaggacaaggctggaggcatttgtcatcactacagatatgcaactaaaatagacgtggagcaagagaaatgcattcccaccgaggccgcttttttaggcctagttgaaagtcaagaaggacagcagcaagcataggctcaggattaaagaaaaaatctgctcacagtctgttctggaggtcacatcaccaacaaagctcacgccctatgcagttctgagaaggtggaggcaccaggctcaaaagaggaaatttagaatttctcattgggagagtaaggtacccccatcccagaatgataactgcacagtggcagaacaaactccaccctaatgtgggtggaccccatccagtctgttgaagg

SEQ ID NO: 9603 - DNA, 800 bp, Homo sapiens
ctgataacgttcacagccccatcctcagcacgtggattcgagtcaccgtgagaattccggtatctcaccctgtcctcaccttcagggctcccagggcccacactgtggtgggggacctgctggagcttcactgtgagtccctgagaggctctcccccgatcctgtaccgattttatcatgaggatgtcaccctggggaacagctcagccccctctggaggaggagcctccttcaacctctctctgactgcagaacattctggaaactactcctgtgatgcagacaatggcctgggggcccagcacagtcatggagtgagtctcagggtcacagttccggtgtctcgccccgtcctcaccctcagggctcccggggcccaggctgtggtgggggacccgctggagcttcactgtgagtccctgagaggctccttcccgatcctgtactggttttatcacgaggatgacaccttggggaacatctcggcccactctggaggaggggcatccttcaacctctctctgactacagaacattctggaaactactcatgtgaggctgacaatggcctgggggcccagcacagtaaagtggtgacactcaatgttacaggaacttccaggaacagaacaggccttaccrctgcgggaatcacggggctggtgstcarcatcytcgtccttgywgctgctgctgctctgctgcattacgccagggcccgaaggaaaccaggaggactttctgccactggaacatctagtcacagtcctagtgagtgtcaggagccttcctcgtccagg

SEQ ID NO: 9604 - DNA, 2474 bp, Homo sapiens
ctcaatcagctttatgcagagaagaagcttactgagctcactgctggtgctggtgtaggcaagtgctgctttggcaatctgggctgacctggcttgtctcctcagaactccttctccaatcctggagcaggcttccatgctgctgtgggcgtccttgctggcctttgctccagtctgtggacaatctgcagctgcacacaaacctgtgatttccgtccatcctccatggaccacattcttcaaaggagagagagtgactctgacttgcaatggatttcagttctatgcaacagagaaaacaacatggtatcatcggcactactggggagaaaagttgaccctgaccccaggaaacaccctcgaggttcgggaatctggactgtacagatgccaggcccggggctccccacgaagtaaccctgtgcgcttgctcttttcttcagactccttaatcctgcaggcaccatattctgtgtttgaaggtgacacattggttctgagatgccacagaagaaggaaagagaaattgactgctgtgaaatatacttggaatggaaacattctttccatttctaataaaagctgggatcttcttatcccacaagcaagttcaaataacaatggcaattatcgatgcattggatatggagacgagaatgatgtatttagatcaaatttcaaaataattaaaattcaagaactatttccacatccagagctgaaagctacagactctcagcctacagaggggaattctgtaaacctgagctgtgaaacacagcttcctccagagcggtcagacaccccacttcacttcaacttcttcagagatggcgaggtcatcctgtcagactggagcacgtacccggaactccagctcccaaccgtctggagagaaaactcaggatcctattggtgtggtgctgaaacagtgaggggtaacatccacaagcacagtccctcgctacagatccatgtgcagcggatccctgtgtctggggtgctcctggagacccagccctcagggggccaggctgttgaaggggagatgctggtccttgtctgctccgtggctgaaggcacaggggataccacattctcctggcaccgagaggacatgcaggagagtctggggaggaaaactcagcgttccctgagagcagagctggagctccctgccatcagacagagccatgcagggggatactactgtacagcagacaacagctacggccctgtccagagcatggtgctgaatgtcactgtgagagagaccccaggcaacagagatggccttgtcgccgcgggagccactggagggctgctcagtgctcttctcctggctgtggccctgctgtttcactgctggcgtcggaggaagtcaggagttggtttcttgggagacgaaaccaggctccctcccgctccaggcccaggagagtcctcccattccatctgccctgcccaggtggagcttcagtcgttgtatgttgatgtacaccccaaaaagggagatttggtatactctgagatccagactactcagctgggagaagaagaggaagctaatacctccaggacacttctagaggataaggatgtctcagttgtctactctgaggtaaagacacaacacccagataactcagctggaaagatcagctctaaggatgaagaaagttaagagaatgaaaagttacgagaacgtcctactcatgtgatttctcccttgtccaaagtcccaggcccagtgcagtccttgcggcccctggaatgatcaactcattccagctttctaattcttctcatgcatatgcattcactcccaggaatactcattcgtctactctgatgttgggatggaatggcctctgaaagacttcactaaaatgaccaggatccacagttaagagaagaccctgtagtatttgctgtgggcctgacctaatgtattccctagggtctgctttagagaagggggataaagagagagaaggactgttatgaaaaacagaagcacaaattttggtgaattgggatttgcagagatgaaaaagactgggtgacctggatctctgcttaatacatctacaaccattgtctcactggagactcacttgcatcagtttgtttaactgtgagtggctgcacaggcactgtgcaaacaatgaaaagccccttcacttctgcctgcacagcttacactgtcaggattcagttgcagattaaagaacccatctggaatggtttacagagagaggaatttaaaagaggacatcagaagagctggagatgcaagctctaggctgcgcttccaaaagcaaatgataattatgttaatgtcattagtgacaaagatttgcaacattagagaaaagagacacaaatataaaattaaaaacttaagtaccaactctccaaaactaaatttgaacttaaaatattagtataaactcataataaactctgccttt

SEQ ID NO: 9605 - DNA, 2797 bp, Homo sapiens
gtgcagtgtcctgactgtaagatcaagtccaaacctgttttggaattgaggaaacttctcttttgatctcagcccttggtggtccaggtcttcatgctgctgtgggtgatattactggtcctggctcctgtcagtggacagtttgcaaggacacccaggcccattattttcctccagcctccatggaccacagtcttccaaggagagagagtgaccctcacttgcaagggatttcgcttctactcaccacagaaaacaaaatggtaccatcggtaccttgggaaagaaatactaagagaaaccccagacaatatccttgaggttcaggaatctggagagtacagatgccaggcccagggctcccctctcagtagccctgtgcacttggatttttcttcagcttcgctgatcctgcaagctccactttctgtgtttgaaggagactctgtggttctgaggtgccgggcaaaggcggaagtaacactgaataatactatttacaagaatgataatgtcctggcattccttaataaaagaactgacttccatattcctcatgcatgtctcaaggacaatggtgcatatcgctgtactggatataaggaaagttgttgccctgtttcttccaatacagtcaaaatccaagtccaagagccatttacacgtccagtgctgagagccagctccttccagcccatcagcgggaacccagtgaccctgacctgtgagacccagctctctctagagaggtcagatgtcccgctccggttccgcttcttcagagatgaccagaccctgggattaggctggagtctctccccgaatttccagattactgccatgtggagtaaagattcagggttctactggtgtaaggcagcaacaatgcctcacagcgtcatatctgacagcccgagatcctggatacaggtgcagatccctgcatctcatcctgtcctcactctcagccctgaaaaggctctgaattttgagggaaccaaggtgacacttcactgtgaaacccaggaagattctctgcgcactttgtacaggttttatcatgagggtgtccccctgaggcacaagtcagtccgctgtgaaaggggagcatccatcagcttctcactgactacagagaattcagggaactactactgcacagctgacaatggccttggcgccaagcccagtaaggctgtgagcctctcagtcactgttcccgtgtctcatcctgtcctcaacctcagctctcctgaggacctgatttttgagggagccaaggtgacacttcactgtgaagcccagagaggttcactccccatcctgtaccagtttcatcatgaggatgctgccctggagcgtaggtcggccaactctgcaggaggagtggccatcagcttctctctgactgcagagcattcagggaactactactgcacagctgacaatggctttggcccccagcgcagtaaggcggtgagcctctccatcactgtccctgtgtctcatcctgtcctcaccctcagctctgctgaggccctgacttttgaaggagccactgtgacacttcactgtgaagtccagagaggttccccacaaatcctataccagttttatcatgaggacatgcccctgtggagcagctcaacaccctctgtgggaagagtgtccttcagcttctctctgactgaaggacattcagggaattactactgcacagctgacaatggctttggtccccagcgcagtgaagtggtgagcctttttgtcactgttccagtgtctcgccccatcctcaccctcagggttcccagggcccaggctgtggtgggggacctgctggagcttcactgtgaggccccgagaggctctcccccaatcctgtactggttttatcatgaggatgtcaccctggggagcagctcagccccctctggaggagaagcttctttcaacctctctctgactgcagaacattctggaaactactcatgtgaggccaacaatggcctagtggcccagcacagtgacacaatatcactcagtgttatagttccagtatctcgtcccatcctcaccttcagggctcccagggcccaggctgtggtgggggacctgctggagcttcactgtgaggccctgagaggctcctccccaatcctgtactggttttatcatgaagatgtcaccctgggtaagatctcagccccctctggaggaggggcctccttcaacctctctctgactacagaacattctggaatctactcctgtgaggcagacaatggtctggaggcccagcgcagtgagatggtgacactgaaagttgcaggtgagtgggccctgcccaccagcagcacatctgagaactgactgtgcctgttctccctgcagctgaaaatggagccacagagctcctcagggctgtttgcttgtgtggcatcccagcacacttcctgcctgcagaacctccctgtgaaagtctcggatcctttgtggtatggttccaggaatctgatgtttcccagcagtcttcttgaagatgatcaaagcacctcactaaaaatgcaaataagacttttttagaacataaactatattctgaactgaaattattacatgaaaatgaaaccaaagaattctgagcatatgtttctctgccgtagaaaggattaagctgtttcttgtccggattcttctctcattgacttctaagaagcctctactcttgagtctctttcattactggggatgtaaatgttccttacatttccacattaaaaatcctatgttaacg

SEQ ID NO: 9606 - DNA, 4422 bp, Homo sapiens
gtgcagtgtcctgactgtaagatcaagtccaaacctgttttggaattgaggaaacttctcttttgatctcagcccttggtggtccaggtcttcatgctgctgtgggtgatattactggtcctggctcctgtcagtggacagtttgcaaggacacccaggcccattattttcctccagcctccatggaccacagtcttccaaggagagagagtgaccctcacttgcaagggatttcgcttctactcaccacagaaaacaaaatggtaccatcggtaccttgggaaagaaatactaagagaaaccccagacaatatccttgaggttcaggaatctggagagtacagatgccaggcccagggctcccctctcagtagccctgtgcacttggatttttcttcagcttcgctgatcctgcaagctccactttctgtgtttgaaggagactctgtggttctgaggtgccgggcaaaggcggaagtaacactgaataatactatttacaagaatgataatgtcctggcattccttaataaaagaactgacttccatattcctcatgcatgtctcaaggacaatggtgcatatcgctgtactggatataaggaaagttgttgccctgtttcttccaatacagtcaaaatccaagtccaagagccatttacacgtccagtgctgagagccagctccttccagcccatcagcgggaacccagtgaccctgacctgtgagacccagctctctctagagaggtcagatgtcccgctccggttccgcttcttcagagatgaccagaccctgggattaggctggagtctctccccgaatttccagattactgccatgtggagtaaagattcagggttctactggtgtaaggcagcaacaatgcctcacagcgtcatatctgacagcccgagatcctggatacaggtgcagatccctgcatctcatcctgtcctcactctcagccctgaaaaggctctgaattttgagggaaccaaggtgacacttcactgtgaaacccaggaagattctctgcgcactttgtacaggttttatcatgagggtgtccccctgaggcacaagtcagtccgctgtgaaaggggagcatccatcagcttctcactgactacagagaattcagggaactactactgcacagctgacaatggccttggcgccaagcccagtaaggctgtgagcctctcagtcactgttcccgtgtctcatcctgtcctcaacctcagctctcctgaggacctgatttttgagggagccaaggtgacacttcactgtgaagcccagagaggttcactccccatcctgtaccagtttcatcatgaggatgctgccctggagcgtaggtcggccaactctgcaggaggagtggccatcagcttctctctgactgcagagcattcagggaactactactgcacagctgacaatggctttggcccccagcgcagtaaggcggtgagcctctccatcactgtccctgtgtctcatcctgtcctcaccctcagctctgctgaggccctgacttttgaaggagccactgtgacacttcactgtgaagtccagagaggttccccacaaatcctataccagttttatcatgaggacatgcccctgtggagcagctcaacaccctctgtgggaagagtgtccttcagcttctctctgactgaaggacattcagggaattactactgcacagctgacaatggctttggtccccagcgcagtgaagtggtgagcctttttgtcactggtaagtgctgggttcttgccagtcacccacccctggctgagttctctctcacccattcctttaaaaatctgtttgcactgtccagtttcctcccctaatcaacttaatccccttcttggcttcctcctcaactaactagctggggttttccgtactcataagtcctggctcagccagacccctaaaacagctcagtagattccccagcttttaccaaatgaatttatttattgtattttctcctcattccttgtatgttccaacagtacgccaatttttcttgatgcacggagcgtgtcctacttctctactgacatttacatattaacttagctacaagcacagtcttatagataaatattggtcaagaccttaaattctccaaaggatttccaatcttatggtagatttggagaaagctgctggtgaacaaagggggaaatggctccctaggaaccaactcctcaaacttctggagtttttatgatcccttgttttctaacctgctaaaatcagtatcattttattgtattattttaaaaaaactattgttgaagtatgacatacattcaagaaacgtgtgcaaattgtatgtgtacgatttggtgtctttttaggagctaagttgcttctgtttttacttgaatctttgtttatagaaactgggggaaagtttactttcttttcagagaagccaaatggtatgatagaaaaatcttgagcctgatgtgtcagacatgcccctagcataacttgttgagtaaagaggttatttttaaaatgtgaatgttctgagactactccaaagtcagagccaaatctactaggaagcttctagacttcactcattctgcatcccattactatctttttatccatgttttactttcttctcatattcagcagcatcttaagcctctttattttctgtttcttgactgtcacccttaatgccagtagaatgtaagcttcatgagaacagaactgcatccatcttggtcttcacaacatccctgtgcctactcagtgtttggcacacagtaggtcctcagtcaacatttgtaatttagtggacagatgatatgacaagatgataagaggggatttaaaaaaatcatctagcaaagcccaagaggaaaaaaaacaaagctattttagaaatgaaataccaatttgaagcagtaagaatagattggatatctttgaaaaccattaattgaatgaagaaccaatttgagaaaacaatacagaatgcaaagtagaaagatacagaaataaaggcaaaagttataatatggaaatcagacaatggatttgtctgtatccagttatgtggataattaaaatggagaccctcagaaaattgaaccgaagagtaaaatgaaactcaaaaatgtagtagaaattgttgggaagtaaagaaaacttgaatatgtagatcagaacatatatgttgatgacgttattgactttgaggttaaaaatatatatatgtgcctatgattatggggaaaaaagcagtcgtctcagaaagaaaaacatcaagttagtcttagactttgcagtgcactcagtaccaaagagagaggaggccagacttggacctgcgagggaagaataataaccgaaaattttatatcaattcaaaaagacattgtcaaaaatacagggattcaggaaactgagaatgcactaagccttctggaaaaaacacctaatgacaaaatctagcccaacaagatgtaaatgaatataaaggactcataatgaggaaaccgcattatgactggctctcaaccctggccgcatattagactcgtcaaagacctttgtaaaaggtcacacattgactcgtcaaagcccctctccagactaattcaattcagaatctcacagatggggccacagaatcagtattttttgacacaacctcaagtgagaatattgtgtagacaagattggaaaccactgatttagatatagaaacaaaggctaatcaactgtgagaattatggtcacagaatagaaagtaactattatgaacactgaaaatgtaaaaaaaatgtaacaaagaaaaatagttagaggaaggagaggaagtaaaggaacaatcattttctcatgattattattatttcagagtaaattgtgagttatttcacaattcaaaaagaatggactgttttaaaaaattagtaatagatttcaaaatgtccattttgtaaatcgtttctgaatactttgtcaacagttactcatcattaatggcttatacttcactaaaattccatggaaaaccaactagtagcctgtagagtcacataggagagaacaagtgaattctttgggtggcgcaagcatagatgttaggactgacaaaaaaaaataataaaaataaacctgtgcattgatatgatcacaaatgatcagggaaagaggaaacagaaactctcatacgccattattacaagtgtaaattggttcaaccttttcgtcttaattgacacattgtaattgtatatatttatggaagcacagtttgatattttgatatacatacatggtatataacgatcaaattaggatatttaatgtacccatcatctcatgcatttatcatttctttggaataaaaacattcaaaagcc

SEQ ID NO: 9607 - DNA, 5321 bp, Homo sapiens
gtgcagtgtcctgactgtaagatcaagtccaaacctgttttggaattgaggaaacttctcttttgatctcagcccttggtggtccaggtcttcatgctgctgtgggtgatattactggtcctggctcctgtcagtggacagtttgcaaggacacccaggcccattattttcctccagcctccatggaccacagtcttccaaggagagagagtgaccctcacttgcaagggatttcgcttctactcaccacagaaaacaaaatggtaccatcggtaccttgggaaagaaatactaagagaaaccccagacaatatccttgaggttcaggaatctggagagtacagatgccaggcccagggctcccctctcagtagccctgtgcacttggatttttcttcagcttcgctgatcctgcaagctccactttctgtgtttgaaggagactctgtggttctgaggtgccgggcaaaggcggaagtaacactgaataatactatttacaagaatgataatgtcctggcattccttaataaaagaactgacttccatattcctcatgcatgtctcaaggacaatggtgcatatcgctgtactggatataaggaaagttgttgccctgtttcttccaatacagtcaaaatccaagtccaagagccatttacacgtccagtgctgagagccagctccttccagcccatcagcgggaacccagtgaccctgacctgtgagacccagctctctctagagaggtcagatgtcccgctccggttccgcttcttcagagatgaccagaccctgggattaggctggagtctctccccgaatttccagattactgccatgtggagtaaagattcagggttctactggtgtaaggcagcaacaatgcctcacagcgtcatatctgacagcccgagatcctggatacaggtgcagatccctgcatctcatcctgtcctcactctcagccctgaaaaggctctgaattttgagggaaccaaggtgacacttcactgtgaaacccaggaagattctctgcgcactttgtacaggttttatcatgagggtgtccccctgaggcacaagtcagtccgctgtgaaaggggagcatccatcagcttctcactgactacagagaattcagggaactactactgcacagctgacaatggccttggcgccaagcccagtaaggctgtgagcctctcagtcactgttcccgtgtctcatcctgtcctcaacctcagctctcctgaggacctgatttttgagggagccaaggtgacacttcactgtgaagcccagagaggttcactccccatcctgtaccagtttcatcatgaggatgctgccctggagcgtaggtcggccaactctgcaggaggagtggccatcagcttctctctgactgcagagcattcagggaactactactgcacagctgacaatggctttggcccccagcgcagtaaggcggtgagcctctccatcactgtccctgtgtctcatcctgtcctcaccctcagctctgctgaggccctgacttttgaaggagccactgtgacacttcactgtgaagtccagagaggttccccacaaatcctataccagttttatcatgaggacatgcccctgtggagcagctcaacaccctctgtgggaagagtgtccttcagcttctctctgactgaaggacattcagggaattactactgcacagctgacaatggctttggtccccagcgcagtgaagtggtgagcctttttgtcactgttccagtgtctcgccccatcctcaccctcagggttcccagggcccaggctgtggtgggggacctgctggagcttcactgtgaggccccgagaggctctcccccaatcctgtactggttttatcatgaggatgtcaccctggggagcagctcagccccctctggaggagaagcttctttcaacctctctctgactgcagaacattctggaaactactcatgtgaggccaacaatggcctagtggcccagcacagtgacacaatatcactcagtgttatagttccagtatctcgtcccatcctcaccttcagggctcccagggcccaggctgtggtgggggacctgctggagcttcactgtgaggccctgagaggctcctccccaatcctgtactggttttatcatgaagatgtcaccctgggtaagatctcagccccctctggaggaggggcctccttcaacctctctctgactacagaacattctggaatctactcctgtgaggcagacaatggtctggaggcccagcgcagtgagatggtgacactgaaagttgcagttccggtgtctcgcccggtcctcaccctcagggctcccgggacccatgctgcggtgggggacctgctggagcttcactgtgaggccctgagaggctctcccctgatcctgtaccggttttttcatgaggatgtcaccctaggaaataggtcgtccccctctggaggagcgtccttaaacctctctctgactgcagagcactctggaaactactcctgtgaggccgacaatggcctcggggcccagcgcagtgagacagtgacactttatatcacagggctgaccgcgaacagaagtggcccttttgccacaggagtcgccgggggcctgctcagcatagcaggccttgctgcgggggcactgctgctctactgctggctctcgagaaaagcagggagaaagcctgcctctgaccccgccaggagcccttcagactcggactcccaagagcccacctatcacaatgtaccagcctgggaagagctgcaaccagtgtacactaatgcaaatcctagaggagaaaatgtggtttactcagaagtacggatcatccaagagaaaaagaaacatgcagtggcctctgaccccaggcatctcaggaacaagggttcccctatcatctactctgaagttaaggtggcgtcaaccccggtttccggatccctgttcttggcttcctcagctcctcacagatgagtccacacgtctctccaactgctgtttcagcctctgcaccccaaagttccccttgggggagaagcagcattgaagtgggaagatttaggctgccccagaccatatctactggcctttgtttcacatgtcctcattctcagtctgaccagaatgcagggccctgctggactgtcacctgtttcccagttaaagccctgactggcaggttttttaatccagtggcaaggtgctcccactccagggcccagcacatctcctggattccttagtgggcttcagctgtggttgctgttctgagtactgctctcatcacacccccacagagggggtcttaccacacaaagggagagtgggccttcaggagatgccgggctggcctaacagctcaggtgctcctaaactccgacacagagttcctgctttgggtggatgcatttctcaattgtcatcagcctggtggggctactgcagtgtgctgccaaatgggacagcacacagcctgtgcacatgggacatgtgatgggtctccccacgggggctgcatttcacactcctccacctgtctcaaactctaaggtcggcacttgacaccaaggtaacttctctcctgctcatgtgtcagtgtctacctgcccaagtaagtggctttcatacaccaagtcccgaagttcttcccatcctaacagaagtaacccagcaagtcaaggccaggaggaccaggggtgcagacagaacacatactggaacacaggaggtgctcaattactatttgactgactgactgaatgaatgaatgaatgaggaagaaaactgtgggtaatcaaactggcataaaatccagtgcactccctaggaaatccgggaggtattctggcttcctaagaaacaacggaagagaaggagcttggatgaagaaactgttcagcaagaagaagggcttcttcacacttttatgtgcttgtggatcacctgaggatctgtgaaaatacagatactgattcagtgggtctgtgtagagcctgagactgccattctaacatgttcccaggggatgctgatgctgctggccctgggactgcactgcatgcatgtgaagccctataggtctcagcagaggcccatggagagggaatgtgtggctctggctgcccagggcccaactcggttcacacggatcgtgctgctccctggccagcctttggccacagcaccaccagctgctgttgctgagagagcttcttctctgtgacatgttggctttcatcagccaccctgggaagcggaaagtagctgccactatctttgtttccccacctcaggcctcacactttcccatgaaaagggtgaatgtatataacctgagccctctccattcagagttgttctcccatctctgagcaatgggatgttctgttccgcttttatgatatccatcacatcttatcttgatctttgctcccagtggattgtacagtgatgacttttaagccccacggccctgaaataaaatccttccaagggcattggaagctcactccacctgaaccatggcttttcatgcttccaagtgtcagggccttgcccagatagacagggctgactctgctgccccaacctttcaaggaggaaaccagacacctgagacaggagcctgtatgcagcccagtgcagccttgcagaggacaaggctggaggcatttgtcatcactacagatatgcaactaaaatagacgtggagcaagagaaatgcattcccaccgaggccgcttttttaggcctagttgaaagtcaagaaggacagcagcaagcataggctcaggattaaagaaaaaaatctgctcacagtctgttctggaggtcacatcaccaacaaagctcacgccctatgcagttctgagaaggtggaggcaccaggctcaaaagaggaaatttagaatttctcattgggagagtaaggtacccccatcccagaatgataactgcacagtggcagaacaaactccaccctaatgtgggtggaccccatccagtctgttgaaggcctgaatgtaacaaaagggcttattcttcctcaagtaagggggaactcctgctttgggctgggacataagtttttctgctttcagacgcaaactgaaaaatggctcttcttgggtcttgagcttgctggcatatggactgaaagaaactatgctattggatctcctggatctccagcttgctgactgcagatcttgagatatgtcagcctctacagtcacaagagctaattcattctaataaaccaatctttc

SEQ ID NO: 9608 - DNA, 2970 bp, Homo sapiens
agtgaaggggtttcccatatgaaaaatacagaaagaattatttgaatactagcaaatacacaacttgatatttctagagaacccaggcacagtcttggagacattactcctgagagactgcagctgatggaagatgagccccaacttctaaaaatgtatcactaccgggattgagatacaaacagcatttaggaaggtctcatctgagtagcagcttcctgccctccttcttggagataagtcgggcttttggtgagacagactttcccaaccctctgcccggccggtgcccatgcttctgtggctgctgctgctgatcctgactcctggaagagaacaatcaggggtggccccaaaagctgtacttctcctcaatcctccatggtccacagccttcaaaggagaaaaagtggctctcatatgcagcagcatatcacattccctagcccagggagacacatattggtatcacgatgagaagttgttgaaaataaaacatgacaagatccaaattacagagcctggaaattaccaatgtaagacccgaggatcctccctcagtgatgccgtgcatgtggaattttcacctgactggctgatcctgcaggctttacatcctgtctttgaaggagacaatgtcattctgagatgtcaggggaaagacaacaaaaacactcatcaaaaggtttactacaaggatggaaaacagcttcctaatagttataatttagagaagatcacagtgaattcagtctccagggataatagcaaatatcattgtactgcttataggaagttttacatacttgacattgaagtaacttcaaaacccctaaatatccaagttcaagagctgtttctacatcctgtgctgagagccagctcttccacgcccatagaggggagtcccatgaccctgacctgtgagacccagctctctccacagaggccagatgtccagctgcaattctccctcttcagagatagccagaccctcggattgggctggagcaggtcccccagactccagatccctgccatgtggactgaagactcagggtcttactggtgtgaggtggagacagtgactcacagcatcaaaaaaaggagcctgagatctcagatacgtgtacagagagtccctgtgtctaatgtgaatctagagatccggcccaccggagggcagctgattgaaggagaaaatatggtccttatttgctcagtagcccagggttcagggactgtcacattctcctggcacaaagaaggaagagtaagaagcctgggtagaaagacccagcgttccctgttggcagagctgcatgttctcaccgtgaaggagagtgatgcagggagatactactgtgcagctgataacgttcacagccccatcctcagcacgtggattcgagtcaccgtgagaattccggtatctcaccctgtcctcaccttcagggctcccagggcccacactgtggtgggggacctgctggagcttcactgtgagtccctgagaggctctcccccgatcctgtaccgattttatcatgaggatgtcaccctggggaacagctcagccccctctggaggaggagcctccttcaacctctctctgactgcagaacattctggaaactactcctgtgatgcagacaatggcctgggggcccagcacagtcatggagtgagtctcagggtcacagttccggtgtctcgccccgtcctcaccctcagggctcccggggcccaggctgtggtgggggacctgctggagcttcactgtgagtccctgagaggctccttcccgatcctgtactggttttatcacgaggatgacaccttggggaacatctcggcccactctggaggaggggcatccttcaacctctctctgactacagaacattctggaaactactcatgtgaggctgacaatggcctgggggcccagcacagtaaagtggtgacactcaatgttacaggaacttccaggaacagaacaggccttaccgctgcgggaatcacggggctggtgctcagcatcctcgtccttgctgctgctgctgctctgctgcattacgccagggcccgaaggaaaccaggaggactttctgccactggaacatctagtcacagtcctagtgagtgtcaggagccttcctcgtccaggccttccaggatagaccctcaagagcccactcactctaaaccactagccccaatggagctggagccaatgtacagcaatgtaaatcctggagatagcaacccgatttattcccagatctggagcatccagcatacaaaagaaaactcagctaattgtccaatgatgcatcaagagcatgaggaacttacagtcctctattcagaactgaagaagacacacccagacgactctgcaggggaggctagcagcagaggcagggcccatgaagaagatgatgaagaaaactatgagaatgtaccacgtgtattactggcctcagaccactagccccttacccagagtggcccacaggaaacagcctgcaccatttttttttctgttctctccaaccacacatcatccatctctccagactctgcctcctacgaggctgggctgcagggtatgtgaggctgagcaaaaggtctgcaaatctcccctgtgcctgatctgtgtgttccccaggaagagagcaggcagcctctgagcaagcactgtgttattttcacagtggagacacgtggcaaggcaggagggccctcagctcctagggctgtcgaatagaggaggagagagaaatggtctagccagggttacaagggcacaatcatgaccatttgatccaagtgtgatcgaaagctgttaatgtgctctctgtataaacaatttgctccaaatattttgtttcccttttttgtgtggctggtagtggcattgctgatgttttggtgtatatgctgtatccttgctaccatattggg

SEQ ID NO: 9609 - DNA, 2580 bp, Homo sapiens
tggtgaccaagagtacatctcttttcaaatagctggattaggtcctcatgctgctgtggtcattgctggtcatctttgatgcagtcactgaacaggcagattcgctgacccttgtggcgccctcttctgtcttcgaaggagacagcatcgttctgaaatgccagggagaacagaactggaaaattcagaagatggcttaccataaggataacaaagagttatctgttttcaaaaaattctcagatttccttatccaaagtgcagttttaagtgacagtggtaactatttctgtagtaccaaaggacaactctttctctgggataaaacttcaaatatagtaaagataaaagtccaagagctctttcaacgtcctgtgctgactgccagctccttccagcccatcgaagggggtccagtgagcctgaaatgtgagacccggctctctccacagaggttggatgttcaactccagttctgcttcttcagagaaaaccaggtcctggggtcaggctggagcagctctccggagctccagatttctgccgtgtggagtgaagacacagggtcttactggtgcaaggcagaaacggtgactcacaggatcagaaaacagagcctccaatcccagattcacgtgcagagaatccccatctctaatgtaagcttggagatccgggcccccgggggacaggtgactgaaggacaaaaactgatcctgctctgctcagtggctgggggtacaggaaatgtcacattctcctggtacagagaggccacaggaaccagtatgggaaagaaaacccagcgttccctgtcagcagagctggagatcccagctgtgaaagagagtgatgccggcaaatattactgtagagctgacaacggccatgtgcctatccagagcaaggtggtgaatatccctgtgagaattccagtgtctcgccctgtcctcaccctcaggtctcctggggcccaggctgcagtgggggacctgctggagcttcactgtgaggccctgagaggctctcccccaatcttgtaccaattttatcatgaggatgtcacccttgggaacagctcggccccctctggaggaggggcctccttcaacctctctttgactgcagaacattctggaaactactcctgtgaggccaacaacggcctgggggcccagtgcagtgaggcagtgccagtctccatctcaggacctgatggctatagaagagacctcatgacagctggagttctctggggactgtttggtgtccttggtttcactggtgttgctttgctgttgtatgccttgttccacaagatatcaggagaaagttctgccactaatgaacccagaggggcttccaggccaaatcctcaagagttcacctattcaagcccaaccccagacatggaggagctgcagccagtgtatgtcaatgtgggctctgtagatgtggatgtggtttattctcaggtctggagcatgcagcagccagaaagctcagcaaacatcaggacacttctggagaacaaggactcccaagtcatctactcttctgtgaagaaatcataacacttggaggaatcagaagggaagatcaacagcaaggatggggcatcattaagacttgctataaaaccttatgaaaatgcttgaggcttatcacctgccacagccagaacgtgcctcaggaggcacctcctgtcatttttgtcctgatgatgtttcttctccaatatcttcttttacctatcaatattcattgaactgctgctacatccagacactgtgcaaataaattatttctgctaccttctcttaagcaatcagtgtgtaaagatttgagggaagaatgaataagagatacaaggtctcaccttcatctactgtgaagtgatgagaacaggacttgatagtggtgtattaacttatttatgtgctgctggatacagtttgctaatattttgttgagaatttttgcaaatatgttcattgggaatattggcctgaaattttcttttccactgtgtctctgccagaatgtttgtatcaggctgatgctggcttcatagaatgagttaggcaggagcccttcctccttgattttttggcatagtttcagcaggattggtaccagttattctttctgcatcttgtagaattcagctatgaatccatctggtctagggcttttgtgttggttggtaagttttttattactaattcaacttcagcgcttgatattggtctaggaggggtttctgtctcttcctggttcaatcttgggagattgtgtgtttccaggaatttagccgtttcctccagattttcttctttatgtgcatcgacttgagtgtaaacataacttatatgcactgggaaaccaaaaaatctgtgtgacttgctttattgcagcatttgttttattttggtagtctggaactgaacctgcaatatcaccaaagtatgcatatagttgcaaaaatgtgatttttgacatagtaaatatgagtatttgcaataaactatgatattacttttgtaagtatatagaataaaatgtaaataatctataaaa

SEQ ID NO: 9610 - DNA, 2303 bp, Homo sapiens
gaggcatctctaggtaccatccctgacctggtcctcatgctgccgaggctgttgctgttgatctgtgctccactctgtgaacctgccgagctgtttttgatagccagcccctcccatcccacagaggggagcccagtgaccctgacgtgtaagatgccctttctacagagttcagatgcccagttccagttctgctttttcagagacacccgggccttgggcccaggctggagcagctcccccaagctccagatcgctgccatgtggaaagaagacacagggtcatactggtgcgaggcacagacaatggcgtccaaagtcttgaggagcaggagatcccagataaatgtgcacagggtccctgtcgctgatgtgagcttggagactcagcccccaggaggacaggtgatggagggagacaggctggtcctcatctgctcagttgctatgggcacaggagacatcaccttcctttggtacaaaggggctgtaggtttaaaccttcagtcaaagacccagcgttcactgacagcagagtatgagattccttcagtgagggagagtgatgctgagcaatattactgtgtagctgaaaatggctatggtcccagccccagtgggctggtgagcatcactgtcagaatcccggtgtctcgcccaatcctcatgctcagggctcccagggcccaggctgcagtggaggatgtgctggagcttcactgtgaggccctgagaggctctcctccaatcctgtactggttttatcacgaggatatcaccctggggagcaggtcggccccctctggaggaggagcctccttcaacctttccctgactgaagaacattctggaaactactcctgtgaggccaacaatggcctgggggcccagcgcagtgaggcggtgacactcaacttcacagtgcctactggggccagaagcaatcatcttacctcaggagtcattgaggggctgctcagcacccttggtccagccaccgtggccttattattttgctacggcctcaaaagaaaaataggaagacgttcagccagggatccactcaggagccttcccagccctctaccccaagagttcacctacctcaactcacctaccccagggcagctacagcctatatatgaaaatgtgaatgttgtaagtggggatgaggtttattcactggcgtactataaccagccggagcaggaatcagtagcagcagaaaccctggggacacatatggaggacaaggtttccttagacatctattccaggctgaggaaagcaaacattacagatgtggactatgaagatgctatgtaaggttatggaagattctgctctttgaaaaccatccatgaccccaagcctcaggcctgatatgttcttcagagatcctggggcattagctttccagtatacctcttctggatgccattctccatggcactattccttcatctactgtgaagtgaagttggcgcagccctgaagaaactacctaggagaactaatagacacaggagtgacagggactttgttatcagaaccagattcctgccggctcctttgaaaacaggtcatattgtgctcttctgtttacaagaggaaacaagatggaataaaagaaattgggatcttgggttggagggacagtgaagcttagagcacatgaactcaaggttagtgactctgcaggacttcacagagagagctgtgcccatcattcagtccaagtgctttctctgcccagacagcacagaactccagccccgctacttacatggatcatcgagtttccacctaaaatatgattctatttattttgagtcactgttaccaaattagaactaaaacaaagttacataaaaagttattgtgactccacttaattttagtgacgtatttttgtatatataggccaacctataccacatccaaaattatgtatctattacagcccctagaagctttataaatacagtgtgtcttcttttattcacaaaatttttgaaatcgtggtaatatggtttgaaacctgtatcttaattattttttttttaaattgagacagggtctcactctgtcactcaatctggaatgcagtggcacaatcttgcctcactgcaacgcctgcctctcaggctcaagcaaacctctcacctcagcctgctgagtagctgggactacaggcacatgccaccaaacttggccattttttgtcttacgtagagacaagatttcaccgttttgcccaggctggtctcaaactcctgggctcaagcaatgtattgaatttt

SEQ ID NO: 9611 - protein, 261 aa, Homo sapiens
MGKKTQRSLSAELEIPAVKESDAGKYYCRADNGHVPIQSKVVNIPVRIPVSRPVLTLRSPGAQAAVGDLLELHCEALRGSPPILYQFYHEDVTLGNSSAPSGGGASFNLSLTAEHSGNYSCEANNGLGAQCSEAVPVSISGPDGYRRDLMTAGVLWGLFGVLGFTGVALLLYALFHKISGESSATNEPRGASRPNPQEFTYSSPTPDMEELQPVYVNVGSVDVDVVYSQVWSMQQPESSANIRTLLENKDSQVIYSSVKKS

SEQ ID NO: 9612 - protein, 255 aa, Homo sapiens
MWEWKICNSHGARPFAEPAGWEFVNLLRHHKSFLIAPLCLSVPVSRPVLTLRSPGAQAAVGDLLELHCEALRGSPPILYQFYHEDVTLGNSSAPSGGGASFNLSLTAEHSGNYSCEANNGLGAQCSEAVPVSISGPDGYRRDLMTAGVLWGLFGVLGFTGVALLLYALFHKISGESSATNEPRGASRPNPQEFTYSSPTPDMEELQPVYVNVGSVDVDVVYSQVWSMQQPESSANIRTLLENKDSQVIYSSVKKS

SEQ ID NO: 9613 - protein, 34 aa, Homo sapiens
MGKKTQRSLSAELEIPAVKESDAGKYYCRADGCG

SEQ ID NO: 9614 - protein, 34 aa, Homo sapiens
NGHVPIQSKVVNIPVRIPVSRPVLTLRSPGAGCG

SEQ ID NO: 9615 - protein, 34 aa, Homo sapiens
QAAVGDLLELHCEALRGSPPILYQFYHEDVTGCG

SEQ ID NO: 9616 - protein, 34 aa, Homo sapiens
LGNSSAPSGGGASFNLSLTAEHSGNYSCEANGCG

SEQ ID NO: 9617 - protein, 35 aa, Homo sapiens
NGLGAQCSEAVPVSISGPDGYRRDLMTAGVLWGCG

SEQ ID NO: 9618 - protein, 9 aa, Homo sapiens
GVLWGLFGV

SEQ ID NO: 9619 - protein, 9 aa, Homo sapiens
LLYALFHKI

SEQ ID NO: 9620 - protein, 9 aa, Homo sapiens
GLFGVLGFT

SEQ ID NO: 9621 - protein, 9 aa, Homo sapiens
VVYSQVWSM

SEQ ID NO: 9622 - protein, 9 aa, Homo sapiens
VLGFTGVAL

SEQ ID NO: 9623 - protein, 9 aa, Homo sapiens
VLWGLFGVL

SEQ ID NO: 9624 - protein, 9 aa, Homo sapiens
YVNVGSVDV

SEQ ID NO: 9625 - protein, 9 aa, Homo sapiens
MTAGVLWGL

SEQ ID NO: 9626 - protein, 9 aa, Homo sapiens
VLTLRSPGA

SEQ ID NO: 9627 - protein, 9 aa, Homo sapiens
ELQPVYVNV

SEQ ID NO: 9628 - protein, 9 aa, Homo sapiens
LLENKDSQV

SEQ ID NO: 9629 - protein, 9 aa, Homo sapiens
AQCSEAVPV

SEQ ID NO: 9630 - protein, 9 aa, Homo sapiens
NVGSVDVDV

SEQ ID NO: 9631 - protein, 9 aa, Homo sapiens
DLLELHCEA

SEQ ID NO: 9632 - protein, 9 aa, Homo sapiens
GLGAQCSEA

SEQ ID NO: 9633 - protein, 9 aa, Homo sapiens
QQPESSANI

SEQ ID NO: 9634 - protein, 9 aa, Homo sapiens
GVALLLYAL

SEQ ID NO: 9635 - protein, 9 aa, Homo sapiens
FGVLGFTGV

SEQ ID NO: 9636 - protein, 9 aa, Homo sapiens
SMQQPESSA

SEQ ID NO: 9637 - protein, 9 aa, Homo sapiens
KISGESSAT

SEQ ID NO: 9638 - protein, 9 aa, Homo sapiens
VLWGLFGVL

SEQ ID NO: 9639 - protein, 9 aa, Homo sapiens
GVLWGLFGV

SEQ ID NO: 9640 - protein, 9 aa, Homo sapiens
GVALLLYAL

SEQ ID NO: 9641 - protein, 9 aa, Homo sapiens
VVYSQVWSM

SEQ ID NO: 9642 - protein, 9 aa, Homo sapiens
YVNVGSVDV

SEQ ID NO: 9643 - protein, 9 aa, Homo sapiens
VLGFTGVAL

SEQ ID NO: 9644 - protein, 9 aa, Homo sapiens
LLYALFHKI

SEQ ID NO: 9645 - protein, 9 aa, Homo sapiens
RIPVSRPVL

SEQ ID NO: 9646 - protein, 9 aa, Homo sapiens
GLFGVLGFT

SEQ ID NO: 9647 - protein, 9 aa, Homo sapiens
KVVNIPVRI

SEQ ID NO: 9648 - protein, 9 aa, Homo sapiens
GVLGFTGVA

SEQ ID NO: 9649 - protein, 9 aa, Homo sapiens
NVGSVDVDV

SEQ ID NO: 9650 - protein, 9 aa, Homo sapiens
HVPIQSKVV

SEQ ID NO: 9651 - protein, 9 aa, Homo sapiens
YQFYHEDVT

SEQ ID NO: 9652 - protein, 9 aa, Homo sapiens
LGFTGVALL

SEQ ID NO: 9653 - protein, 9 aa, Homo sapiens
YSCEANNGL

SEQ ID NO: 9654 - protein, 9 aa, Homo sapiens
KISGESSAT

SEQ ID NO: 9655 - protein, 9 aa, Homo sapiens
MTAGVLWGL

SEQ ID NO: 9656 - protein, 9 aa, Homo sapiens
PVSRPVLTL

SEQ ID NO: 9657 - protein, 9 aa, Homo sapiens
AQAAVGDLL

SEQ ID NO: 9658 - protein, 9 aa, Homo sapiens
GFTGVALLL

SEQ ID NO: 9659 - protein, 9 aa, Homo sapiens
TYSSPTPDM

SEQ ID NO: 9660 - protein, 9 aa, Homo sapiens
QFYHEDVTL

SEQ ID NO: 9661 - protein, 9 aa, Homo sapiens
RIPVSRPVL

SEQ ID NO: 9662 - protein, 9 aa, Homo sapiens
LYQFYHEDV

SEQ ID NO: 9663 - protein, 9 aa, Homo sapiens
AAVGDLLEL

SEQ ID NO: 9664 - protein, 9 aa, Homo sapiens
LLELHCEAL

SEQ ID NO: 9665 - protein, 9 aa, Homo sapiens
GAQAAVGDL

SEQ ID NO: 9666 - protein, 9 aa, Homo sapiens
YSCEANNGL

SEQ ID NO: 9667 - protein, 9 aa, Homo sapiens
VLWGLFGVL

SEQ ID NO: 9668 - protein, 9 aa, Homo sapiens
MTAGVLWGL

SEQ ID NO: 9669 - protein, 9 aa, Homo sapiens
AQAAVGDLL

SEQ ID NO: 9670 - protein, 9 aa, Homo sapiens
SSANIRTLL

SEQ ID NO: 9671 - protein, 9 aa, Homo sapiens
TQRSLSAEL

SEQ ID NO: 9672 - protein, 9 aa, Homo sapiens
SPTPDMEEL

SEQ ID NO: 9673 - protein, 9 aa, Homo sapiens
GSPPILYQF

SEQ ID NO: 9674 - protein, 9 aa, Homo sapiens
LYALFHKIS

SEQ ID NO: 9675 - protein, 9 aa, Homo sapiens
GYRRDLMTA

SEQ ID NO: 9676 - protein, 9 aa, Homo sapiens
GVALLLYAL

SEQ ID NO: 9677 - protein, 9 aa, Homo sapiens
KVVNIPVRI

SEQ ID NO: 9678 - protein, 9 aa, Homo sapiens
LLLYALFHK

SEQ ID NO: 9679 - protein, 9 aa, Homo sapiens
LLYALFHKI

SEQ ID NO: 9680 - protein, 9 aa, Homo sapiens
VLWGLFGVL

SEQ ID NO: 9681 - protein, 9 aa, Homo sapiens
NIRTLLENK

SEQ ID NO: 9682 - protein, 9 aa, Homo sapiens
QVIYSSVKK

SEQ ID NO: 9683 - protein, 9 aa, Homo sapiens
AVKESDAGK

SEQ ID NO: 9684 - protein, 9 aa, Homo sapiens
SQVIYSSVK

SEQ ID NO: 9685 - protein, 9 aa, Homo sapiens
DMEELQPVY

SEQ ID NO: 9686 - protein, 9 aa, Homo sapiens
ALLLYALFH

SEQ ID NO: 9687 - protein, 9 aa, Homo sapiens
GLFGVLGFT

SEQ ID NO: 9688 - protein, 9 aa, Homo sapiens
ALRGSPPIL

SEQ ID NO: 9689 - protein, 9 aa, Homo sapiens
VVYSQVWSM

SEQ ID NO: 9690 - protein, 9 aa, Homo sapiens
GVALLLYAL

SEQ ID NO: 9691 - protein, 9 aa, Homo sapiens
FTGVALLLY

SEQ ID NO: 9692 - protein, 9 aa, Homo sapiens
GLGAQCSEA

SEQ ID NO: 9693 - protein, 9 aa, Homo sapiens
VLGFTGVAI

SEQ ID NO: 9694 - protein, 9 aa, Homo sapiens
LLELHCEAL

SEQ ID NO: 9695 - protein, 9 aa, Homo sapiens
KVVNIPVRI

SEQ ID NO: 9696 - protein, 9 aa, Homo sapiens
GVLWGLFGV

SEQ ID NO: 9697 - protein, 9 aa, Homo sapiens
MTAGVLWGL

SEQ ID NO: 9698 - protein, 9 aa, Homo sapiens
QVIYSSVKK

SEQ ID NO: 9699 - protein, 9 aa, Homo sapiens
AVKESDAGK

SEQ ID NO: 9700 - protein, 9 aa, Homo sapiens
ISGPDGYRR

SEQ ID NO: 9701 - protein, 9 aa, Homo sapiens
ESSATNEPR

SEQ ID NO: 9702 - protein, 9 aa, Homo sapiens
VSRPVLTLR

SEQ ID NO: 9703 - protein, 9 aa, Homo sapiens
DVTLGNSSA

SEQ ID NO: 9704 - protein, 9 aa, Homo sapiens
NVGSVDVDV

SEQ ID NO: 9705 - protein, 9 aa, Homo sapiens
DVDVVYSQV

SEQ ID NO: 9706 - protein, 9 aa, Homo sapiens
IPVRIPVSR

SEQ ID NO: 9707 - protein, 9 aa, Homo sapiens
LLLYALFHK

SEQ ID NO: 9708 - protein, 9 aa, Homo sapiens
GVLWGLFGV

SEQ ID NO: 9709 - protein, 9 aa, Homo sapiens
GVALLLYAL

SEQ ID NO: 9710 - protein, 9 aa, Homo sapiens
KVVNIPVRI

SEQ ID NO: 9711 - protein, 9 aa, Homo sapiens
AVGDLLELH

SEQ ID NO: 9712 - protein, 9 aa, Homo sapiens
GVLGFTGVA

SEQ ID NO: 9713 - protein, 9 aa, Homo sapiens
SISGPDGYR

SEQ ID NO: 9714 - protein, 9 aa, Homo sapiens
SQVIYSSVK

SEQ ID NO: 9715 - protein, 9 aa, Homo sapiens
QPESSANIR

SEQ ID NO: 9716 - protein, 9 aa, Homo sapiens
LELHCEALR

SEQ ID NO: 9717 - protein, 9 aa, Homo sapiens
HVPIQSKVV

SEQ ID NO: 9718 - protein, 9 aa, Homo sapiens
QVIYSSVKK

SEQ ID NO: 9719 - protein, 9 aa, Homo sapiens
AVKESDAGK

SEQ ID NO: 9720 - protein, 9 aa, Homo sapiens
LLLYALFHK

SEQ ID NO: 9721 - protein, 9 aa, Homo sapiens
SQVIYSSVK

SEQ ID NO: 9722 - protein, 9 aa, Homo sapiens
NIRTLLENK

SEQ ID NO: 9723 - protein, 9 aa, Homo sapiens
GVLWGLFGV

SEQ ID NO: 9724 - protein, 9 aa, Homo sapiens
GVALLLYAL

SEQ ID NO: 9725 - protein, 9 aa, Homo sapiens
KVVNIPVRI

SEQ ID NO: 9726 - protein, 9 aa, Homo sapiens
GVLGFTGVA

SEQ ID NO: 9727 - protein, 9 aa, Homo sapiens
AELEIPAVK

SEQ ID NO: 9728 - protein, 9 aa, Homo sapiens
SISGPDGYR

SEQ ID NO: 9729 - protein, 9 aa, Homo sapiens
VVYSQVWSM

SEQ ID NO: 9730 - protein, 9 aa, Homo sapiens
IPVRIPVSR

SEQ ID NO: 9731 - protein, 9 aa, Homo sapiens
QPESSANIR

SEQ ID NO: 9732 - protein, 9 aa, Homo sapiens
GYRRDLMTA

SEQ ID NO: 9733 - protein, 9 aa, Homo sapiens
NVGSVDVDV

SEQ ID NO: 9734 - protein, 9 aa, Homo sapiens
MTAGVLWGL

SEQ ID NO: 9735 - protein, 9 aa, Homo sapiens
YVNVGSVDV

SEQ ID NO: 9736 - protein, 9 aa, Homo sapiens
FTGVALLLY

SEQ ID NO: 9737 - protein, 9 aa, Homo sapiens
NGHVPIQSK

SEQ ID NO: 9738 - protein, 9 aa, Homo sapiens
LLLYALFHK

SEQ ID NO: 9739 - protein, 9 aa, Homo sapiens
SISGPDGYR

SEQ ID NO: 9740 - protein, 9 aa, Homo sapiens
VVYSQVWSM

SEQ ID NO: 9741 - protein, 9 aa, Homo sapiens
QVIYSSVKK

SEQ ID NO: 9742 - protein, 9 aa, Homo sapiens
SQVIYSSVK

SEQ ID NO: 9743 - protein, 9 aa, Homo sapiens
NIRTLLENK

SEQ ID NO: 9744 - protein, 9 aa, Homo sapiens
IPVRIPVSR

SEQ ID NO: 9745 - protein, 9 aa, Homo sapiens
GVLWGLFGV

SEQ ID NO: 9746 - protein, 9 aa, Homo sapiens
GVALLLYAL

SEQ ID NO: 9747 - protein, 9 aa, Homo sapiens
AVKESDAGK

SEQ ID NO: 9748 - protein, 9 aa, Homo sapiens
QPESSANIR

SEQ ID NO: 9749 - protein, 9 aa, Homo sapiens
LLYALFHKI

SEQ ID NO: 9750 - protein, 9 aa, Homo sapiens
KVVNIPVRI

SEQ ID NO: 9751 - protein, 9 aa, Homo sapiens
VLWGLFGVL

SEQ ID NO: 9752 - protein, 9 aa, Homo sapiens
ISGPDGYRR

SEQ ID NO: 9753 - protein, 9 aa, Homo sapiens
SDAGKYYCR

SEQ ID NO: 9754 - protein, 9 aa, Homo sapiens
MTAGVLWGL

SEQ ID NO: 9755 - protein, 9 aa, Homo sapiens
ALLLYALFH

SEQ ID NO: 9756 - protein, 9 aa, Homo sapiens
SKVVNIPVR

SEQ ID NO: 9757 - protein, 9 aa, Homo sapiens
RIPVSRPVL

SEQ ID NO: 9758 - protein, 9 aa, Homo sapiens
ESSATNEPR

SEQ ID NO: 9759 - protein, 9 aa, Homo sapiens
SISGPDGYR

SEQ ID NO: 9760 - protein, 9 aa, Homo sapiens
VSRPVLTLR

SEQ ID NO: 9761 - protein, 9 aa, Homo sapiens
ISGPDGYRR

SEQ ID NO: 9762 - protein, 9 aa, Homo sapiens
QPESSANIR

SEQ ID NO: 9763 - protein, 9 aa, Homo sapiens
TNEPRGASR

SEQ ID NO: 9764 - protein, 9 aa, Homo sapiens
IPVRIPVSR

SEQ ID NO: 9765 - protein, 9 aa, Homo sapiens
DVTLGNSSA

SEQ ID NO: 9766 - protein, 9 aa, Homo sapiens
DSQVIYSSV

SEQ ID NO: 9767 - protein, 9 aa, Homo sapiens
ESSANIRTL

SEQ ID NO: 9768 - protein, 9 aa, Homo sapiens
DVDVVYSQV

SEQ ID NO: 9769 - protein, 9 aa, Homo sapiens
DVVYSQVWS

SEQ ID NO: 9770 - protein, 9 aa, Homo sapiens
ESDAGKYYC

SEQ ID NO: 9771 - protein, 9 aa, Homo sapiens
ELQPVYVNV

SEQ ID NO: 9772 - protein, 9 aa, Homo sapiens
DLLELHCEA

SEQ ID NO: 9773 - protein, 9 aa, Homo sapiens
NVGSVDVDV

SEQ ID NO: 9774 - protein, 9 aa, Homo sapiens
SVDVDVVYS

SEQ ID NO: 9775 - protein, 9 aa, Homo sapiens
LYQFYHEDV

SEQ ID NO: 9776 - protein, 9 aa, Homo sapiens
TYSSPTPDM

SEQ ID NO: 9777 - protein, 9 aa, Homo sapiens
NIPVRIPVS

SEQ ID NO: 9778 - protein, 9 aa, Homo sapiens
VRIPVSRPV

SEQ ID NO: 9779 - protein, 9 aa, Homo sapiens
RIPVSRPVL

SEQ ID NO: 9780 - protein, 9 aa, Homo sapiens
LGFTGVALL

SEQ ID NO: 9781 - protein, 9 aa, Homo sapiens
AAVGDLLEL

SEQ ID NO: 9782 - protein, 9 aa, Homo sapiens
ESSANIRTL

SEQ ID NO: 9783 - protein, 9 aa, Homo sapiens
SSANIRTLL

SEQ ID NO: 9784 - protein, 9 aa, Homo sapiens
DGYRRDLMT

SEQ ID NO: 9785 - protein, 9 aa, Homo sapiens
RRDLMTAGV

SEQ ID NO: 9786 - protein, 9 aa, Homo sapiens
NIPVRIPVS

SEQ ID NO: 9787 - protein, 9 aa, Homo sapiens
EALRGSPPI

SEQ ID NO: 9788 - protein, 9 aa, Homo sapiens
GVLWGLFGV

SEQ ID NO: 9789 - protein, 9 aa, Homo sapiens
GVALLLYAL

SEQ ID NO: 9790 - protein, 9 aa, Homo sapiens
VNIPVRIPV

SEQ ID NO: 9791 - protein, 9 aa, Homo sapiens
MTAGVLWGL

SEQ ID NO: 9792 - protein, 9 aa, Homo sapiens
VLWGLFGVL

SEQ ID NO: 9793 - protein, 9 aa, Homo sapiens
GAQAAVGDL

SEQ ID NO: 9794 - protein, 9 aa, Homo sapiens
VVYSQVWSM

SEQ ID NO: 9795 - protein, 9 aa, Homo sapiens
SPTPDMEEL

SEQ ID NO: 9796 - protein, 9 aa, Homo sapiens
SRPNPQEFT

SEQ ID NO: 9797 - protein, 9 aa, Homo sapiens
SRPVLTLRS

SEQ ID NO: 9798 - protein, 9 aa, Homo sapiens
CEANNGLGA

SEQ ID NO: 9799 - protein, 9 aa, Homo sapiens
LEIPAVKES

SEQ ID NO: 9800 - protein, 9 aa, Homo sapiens
QEFTYSSPT

SEQ ID NO: 9801 - protein, 9 aa, Homo sapiens
SEAVPVSIS

SEQ ID NO: 9802 - protein, 9 aa, Homo sapiens
VDVVYSQVW

SEQ ID NO: 9803 - protein, 9 aa, Homo sapiens
AEHSGNYSC

SEQ ID NO: 9804 - protein, 9 aa, Homo sapiens
RDLMTAGVL

SEQ ID NO: 9805 - protein, 9 aa, Homo sapiens
ASFNLSLTA

SEQ ID NO: 9806 - protein, 9 aa, Homo sapiens
LENKDSQVI

SEQ ID NO: 9807 - protein, 9 aa, Homo sapiens
AAVGDLLEL

SEQ ID NO: 9808 - protein, 9 aa, Homo sapiens
KESDAGKYY

SEQ ID NO: 9809 - protein, 9 aa, Homo sapiens
EELQPVYVN

SEQ ID NO: 9810 - protein, 9 aa, Homo sapiens
LGFTGVALL

SEQ ID NO: 9811 - protein, 9 aa, Homo sapiens
EDVTLGNSS

SEQ ID NO: 9812 - protein, 9 aa, Homo sapiens
TGVALLLYA

SEQ ID NO: 9813 - protein, 9 aa, Homo sapiens
HEDVTLGNS

SEQ ID NO: 9814 - protein, 9 aa, Homo sapiens
GGASFNLSL

SEQ ID NO: 9815 - protein, 9 aa, Homo sapiens
SSAPSGGGA

SEQ ID NO: 9816 - protein, 9 aa, Homo sapiens
MEELQPVYV

SEQ ID NO: 9817 - protein, 9 aa, Homo sapiens
AELEIPAVK

SEQ ID NO: 9818 - protein, 9 aa, Homo sapiens
RDLMTAGVL

SEQ ID NO: 9819 - protein, 9 aa, Homo sapiens
AAVGDLLEL

SEQ ID NO: 9820 - protein, 9 aa, Homo sapiens
MEELQPVYV

SEQ ID NO: 9821 - protein, 9 aa, Homo sapiens
GGASFNLSL

SEQ ID NO: 9822 - protein, 9 aa, Homo sapiens
CEANNGLGA

SEQ ID NO: 9823 - protein, 9 aa, Homo sapiens
SSANIRTLL

SEQ ID NO: 9824 - protein, 9 aa, Homo sapiens
MTAGVLWGL

SEQ ID NO: 9825 - protein, 9 aa, Homo sapiens
LENKDSQVI

SEQ ID NO: 9826 - protein, 9 aa, Homo sapiens
ESSANIRTL

SEQ ID NO: 9827 - protein, 9 aa, Homo sapiens
AEHSGNYSC

SEQ ID NO: 9828 - protein, 9 aa, Homo sapiens
EELQPVYVN

SEQ ID NO: 9829 - protein, 9 aa, Homo sapiens
AQAAVGDLL

SEQ ID NO: 9830 - protein, 9 aa, Homo sapiens
YSCEANNGL

SEQ ID NO: 9831 - protein, 9 aa, Homo sapiens
QEFTYSSPT

SEQ ID NO: 9832 - protein, 9 aa, Homo sapiens
MGKKTQRSL

SEQ ID NO: 9833 - protein, 9 aa, Homo sapiens
LGFTGVALL

SEQ ID NO: 9834 - protein, 9 aa, Homo sapiens
SGGGASFNL

SEQ ID NO: 9835 - protein, 9 aa, Homo sapiens
GPDGYRRDL

SEQ ID NO: 9836 - protein, 9 aa, Homo sapiens
GAQAAVGDL

SEQ ID NO: 9837 - protein, 9 aa, Homo sapiens
SPTPDMEEL

SEQ ID NO: 9838 - protein, 9 aa, Homo sapiens
CEANNGLGA

SEQ ID NO: 9839 - protein, 9 aa, Homo sapiens
MEELQPVYV

SEQ ID NO: 9840 - protein, 9 aa, Homo sapiens
QEFTYSSPT

SEQ ID NO: 9841 - protein, 9 aa, Homo sapiens
LENKDSQVI

SEQ ID NO: 9842 - protein, 9 aa, Homo sapiens
AEHSGNYSC

SEQ ID NO: 9843 - protein, 9 aa, Homo sapiens
EELQPVYVN

SEQ ID NO: 9844 - protein, 9 aa, Homo sapiens
RDLMTAGVL

SEQ ID NO: 9845 - protein, 9 aa, Homo sapiens
LGAQCSEAV

SEQ ID NO: 9846 - protein, 9 aa, Homo sapiens
FGVLGFTGV

SEQ ID NO: 9847 - protein, 9 aa, Homo sapiens
VNIPVRIPV

SEQ ID NO: 9848 - protein, 9 aa, Homo sapiens
SAELEIPAV

SEQ ID NO: 9849 - protein, 9 aa, Homo sapiens
SEAVPVSIS

SEQ ID NO: 9850 - protein, 9 aa, Homo sapiens
LEIPAVKES

SEQ ID NO: 9851 - protein, 9 aa, Homo sapiens
ASFNLSLTA

SEQ ID NO: 9852 - protein, 9 aa, Homo sapiens
RSPGAQAAV

SEQ ID NO: 9853 - protein, 9 aa, Homo sapiens
TGVALLLYA

SEQ ID NO: 9854 - protein, 9 aa, Homo sapiens
PDMEELQPV

SEQ ID NO: 9855 - protein, 9 aa, Homo sapiens
YCRADNGHV

SEQ ID NO: 9856 - protein, 9 aa, Homo sapiens
IPAVKESDA

SEQ ID NO: 9857 - protein, 9 aa, Homo sapiens
LSAELEIPA

SEQ ID NO: 9858 - protein, 9 aa, Homo sapiens
TQRSLSAEL

SEQ ID NO: 9859 - protein, 9 aa, Homo sapiens
TAGVLWGLF

SEQ ID NO: 9860 - protein, 9 aa, Homo sapiens
AQAAVGDLL

SEQ ID NO: 9861 - protein, 9 aa, Homo sapiens
ALRGSPPIL

SEQ ID NO: 9862 - protein, 9 aa, Homo sapiens
DLMTAGVLW

SEQ ID NO: 9863 - protein, 9 aa, Homo sapiens
TLRSPGAQA

SEQ ID NO: 9864 - protein, 9 aa, Homo sapiens
ELQPVYVNV

SEQ ID NO: 9865 - protein, 9 aa, Homo sapiens
VLWGLFGVL

SEQ ID NO: 9866 - protein, 9 aa, Homo sapiens
GLFGVLGFT

SEQ ID NO: 9867 - protein, 9 aa, Homo sapiens
FTGVALLLY

SEQ ID NO: 9868 - protein, 9 aa, Homo sapiens
APSGGGASF

SEQ ID NO: 9869 - protein, 9 aa, Homo sapiens
WGLFGVLGF

SEQ ID NO: 9870 - protein, 9 aa, Homo sapiens
AQCSEAVPV

SEQ ID NO: 9871 - protein, 9 aa, Homo sapiens
VLGFTGVAL

SEQ ID NO: 9872 - protein, 9 aa, Homo sapiens
QQPESSANI

SEQ ID NO: 9873 - protein, 9 aa, Homo sapiens
DLLELHCEA

SEQ ID NO: 9874 - protein, 9 aa, Homo sapiens
GLGAQCSEA

SEQ ID NO: 9875 - protein, 9 aa, Homo sapiens
LLYALFHKI

SEQ ID NO: 9876 - protein, 9 aa, Homo sapiens
VALLLYALF

SEQ ID NO: 9877 - protein, 9 aa, Homo sapiens
SPPILYQFY

SEQ ID NO: 9878 - protein, 9 aa, Homo sapiens
ALRGSPPIL

SEQ ID NO: 9879 - protein, 9 aa, Homo sapiens
SPTPDMEEL

SEQ ID NO: 9880 - protein, 9 aa, Homo sapiens
TQRSLSAEL

SEQ ID NO: 9881 - protein, 9 aa, Homo sapiens
GPDGYRRDL

SEQ ID NO: 9882 - protein, 9 aa, Homo sapiens
AAVGDLLEL

SEQ ID NO: 9883 - protein, 9 aa, Homo sapiens
GVALLLYAL

SEQ ID NO: 9884 - protein, 9 aa, Homo sapiens
AQAAVGDLL

SEQ ID NO: 9885 - protein, 9 aa, Homo sapiens
GAQAAVGDL

SEQ ID NO: 9886 - protein, 9 aa, Homo sapiens
SSANIRTLL

SEQ ID NO: 9887 - protein, 9 aa, Homo sapiens
RIPVSRPVL

SEQ ID NO: 9888 - protein, 9 aa, Homo sapiens
VVYSQVWSM

SEQ ID NO: 9889 - protein, 9 aa, Homo sapiens
SGGGASFNL

SEQ ID NO: 9890 - protein, 9 aa, Homo sapiens
MGKKTQRSL

SEQ ID NO: 9891 - protein, 9 aa, Homo sapiens
YSCEANNGL

SEQ ID NO: 9892 - protein, 9 aa, Homo sapiens
ESSANIRTL

SEQ ID NO: 9893 - protein, 9 aa, Homo sapiens
LGFTGVALL

SEQ ID NO: 9894 - protein, 9 aa, Homo sapiens
GGASFNLSL

SEQ ID NO: 9895 - protein, 9 aa, Homo sapiens
VLGFTGVAL

SEQ ID NO: 9896 - protein, 9 aa, Homo sapiens
MTAGVLWGL

SEQ ID NO: 9897 - protein, 9 aa, Homo sapiens
EPRGASRPN

SEQ ID NO: 9898 - protein, 9 aa, Homo sapiens
ALRGSPPIL

SEQ ID NO: 9899 - protein, 9 aa, Homo sapiens
TQRSLSAEL

SEQ ID NO: 9900 - protein, 9 aa, Homo sapiens
EPRGASRPN

SEQ ID NO: 9901 - protein, 9 aa, Homo sapiens
GAQAAVGDL

SEQ ID NO: 9902 - protein, 9 aa, Homo sapiens
IPVSRPVLT

SEQ ID NO: 9903 - protein, 9 aa, Homo sapiens
IPAVKESDA

SEQ ID NO: 9904 - protein, 9 aa, Homo sapiens
MGKKTQRSL

SEQ ID NO: 9905 - protein, 9 aa, Homo sapiens
QSKVVNIPV

SEQ ID NO: 9906 - protein, 9 aa, Homo sapiens
YCRADNGHV

SEQ ID NO: 9907 - protein, 9 aa, Homo sapiens
ESSANIRTL

SEQ ID NO: 9908 - protein, 9 aa, Homo sapiens
VLTLRSPGA

SEQ ID NO: 9909 - protein, 9 aa, Homo sapiens
VLGFTGVAL

SEQ ID NO: 9910 - protein, 9 aa, Homo sapiens
TLRSPGAQA

SEQ ID NO: 9911 - protein, 9 aa, Homo sapiens
EALRGSPPI

SEQ ID NO: 9912 - protein, 9 aa, Homo sapiens
VLWGLFGVL

SEQ ID NO: 9913 - protein, 9 aa, Homo sapiens
ENKDSQVIY

SEQ ID NO: 9914 - protein, 9 aa, Homo sapiens
YSCEANNGL

SEQ ID NO: 9915 - protein, 9 aa, Homo sapiens
LLENKDSQV

SEQ ID NO: 9916 - protein, 9 aa, Homo sapiens
MTAGVLWGL

SEQ ID NO: 9917 - protein, 9 aa, Homo sapiens
SSANIRTLL

SEQ ID NO: 9918 - protein, 9 aa, Homo sapiens
LRGSPPILY

SEQ ID NO: 9919 - protein, 9 aa, Homo sapiens
RRDLMTAGV

SEQ ID NO: 9920 - protein, 9 aa, Homo sapiens
SRPNPQEFT

SEQ ID NO: 9921 - protein, 9 aa, Homo sapiens
LRSPGAQAA

SEQ ID NO: 9922 - protein, 9 aa, Homo sapiens
YQFYHEDVT

SEQ ID NO: 9923 - protein, 9 aa, Homo sapiens
SRPVLTLRS

SEQ ID NO: 9924 - protein, 9 aa, Homo sapiens
VRIPVSRPV

SEQ ID NO: 9925 - protein, 9 aa, Homo sapiens
QQPESSANI

SEQ ID NO: 9926 - protein, 9 aa, Homo sapiens
AQAAVGDLL

SEQ ID NO: 9927 - protein, 9 aa, Homo sapiens
TQRSLSAEL

SEQ ID NO: 9928 - protein, 9 aa, Homo sapiens
VLWGLFGVL

SEQ ID NO: 9929 - protein, 9 aa, Homo sapiens
LLYALFHKI

SEQ ID NO: 9930 - protein, 9 aa, Homo sapiens
RPNPQEFTY

SEQ ID NO: 9931 - protein, 9 aa, Homo sapiens
KESDAGKYY

SEQ ID NO: 9932 - protein, 9 aa, Homo sapiens
AQCSEAVPV

SEQ ID NO: 9933 - protein, 9 aa, Homo sapiens
IRTLLENKD

SEQ ID NO: 9934 - protein, 9 aa, Homo sapiens
QRSLSAELE

SEQ ID NO: 9935 - protein, 9 aa, Homo sapiens
YRRDLMTAG

SEQ ID NO: 9936 - protein, 9 aa, Homo sapiens
CRADNGHVP

SEQ ID NO: 9937 - protein, 9 aa, Homo sapiens
QEFTYSSPT

SEQ ID NO: 9938 - protein, 9 aa, Homo sapiens
RRDLMTAGV

SEQ ID NO: 9939 - protein, 9 aa, Homo sapiens
LRGSPPILY

SEQ ID NO: 9940 - protein, 9 aa, Homo sapiens
TQRSLSAEL

SEQ ID NO: 9941 - protein, 9 aa, Homo sapiens
SQVIYSSVK

SEQ ID NO: 9942 - protein, 9 aa, Homo sapiens
LRSPGAQAA

SEQ ID NO: 9943 - protein, 9 aa, Homo sapiens
AQAAVGDLL

SEQ ID NO: 9944 - protein, 9 aa, Homo sapiens
SRPVLTLRS

SEQ ID NO: 9945 - protein, 9 aa, Homo sapiens
SRPNPQEFT

SEQ ID NO: 9946 - protein, 9 aa, Homo sapiens
VRIPVSRPV

SEQ ID NO: 9947 - protein, 9 aa, Homo sapiens
VLWGLFGVL

SEQ ID NO: 9948 - protein, 9 aa, Homo sapiens
YQFYHEDVT

SEQ ID NO: 9949 - protein, 9 aa, Homo sapiens
AQCSEAVPV

SEQ ID NO: 9950 - protein, 9 aa, Homo sapiens
QQPESSANI

SEQ ID NO: 9951 - protein, 9 aa, Homo sapiens
LLYALFHKI

SEQ ID NO: 9952 - protein, 9 aa, Homo sapiens
RIPVSRPVL

SEQ ID NO: 9953 - protein, 9 aa, Homo sapiens
LLELHCEAL

SEQ ID NO: 9954 - protein, 9 aa, Homo sapiens
ALRGSPPIL

SEQ ID NO: 9955 - protein, 9 aa, Homo sapiens
LLLYALFHK

SEQ ID NO: 9956 - protein, 9 aa, Homo sapiens
AELEIPAVK

SEQ ID NO: 9957 - protein, 9 aa, Homo sapiens
VLGFTGVAL

SEQ ID NO: 9958 - protein, 9 aa, Homo sapiens
RPNPQEFTY

SEQ ID NO: 9959 - protein, 9 aa, Homo sapiens
SPPILYQFY

SEQ ID NO: 9960 - protein, 9 aa, Homo sapiens
SPTPDMEEL

SEQ ID NO: 9961 - protein, 9 aa, Homo sapiens
GSVDVDVVY

SEQ ID NO: 9962 - protein, 9 aa, Homo sapiens
APSGGGASF

SEQ ID NO: 9963 - protein, 9 aa, Homo sapiens
ASRPNPQEF

SEQ ID NO: 9964 - protein, 9 aa, Homo sapiens
ENKDSQVIY

SEQ ID NO: 9965 - protein, 9 aa, Homo sapiens
YSCEANNGL

SEQ ID NO: 9966 - protein, 9 aa, Homo sapiens
VSISGPDGY

SEQ ID NO: 9967 - protein, 9 aa, Homo sapiens
EPRGASRPN

SEQ ID NO: 9968 - protein, 9 aa, Homo sapiens
GPDGYRRDL

SEQ ID NO: 9969 - protein, 9 aa, Homo sapiens
GSPPILYQF

SEQ ID NO: 9970 - protein, 9 aa, Homo sapiens
ESSANIRTL

SEQ ID NO: 9971 - protein, 9 aa, Homo sapiens
SSANIRTLL

SEQ ID NO: 9972 - protein, 9 aa, Homo sapiens
AAVGDLLEL

SEQ ID NO: 9973 - protein, 9 aa, Homo sapiens
LTAEHSGNY

SEQ ID NO: 9974 - protein, 9 aa, Homo sapiens
NPQEFTYSS

SEQ ID NO: 9975 - protein, 9 aa, Homo sapiens
RSLSAELEI

SEQ ID NO: 9976 - protein, 9 aa, Homo sapiens
TAGVLWGLF

SEQ ID NO: 9977 - protein, 9 aa, Homo sapiens
QSKVVNIPV

SEQ ID NO: 9978 - protein, 9 aa, Homo sapiens
RDLMTAGVL

SEQ ID NO: 9979 - protein, 9 aa, Homo sapiens
LENKDSQVI

SEQ ID NO: 9980 - protein, 9 aa, Homo sapiens
SSANIRTLL

SEQ ID NO: 9981 - protein, 9 aa, Homo sapiens
AQAAVGDLL

SEQ ID NO: 9982 - protein, 9 aa, Homo sapiens
GFTGVALLL

SEQ ID NO: 9983 - protein, 9 aa, Homo sapiens
KDSQVIYSS

SEQ ID NO: 9984 - protein, 9 aa, Homo sapiens
LGFTGVALL

SEQ ID NO: 9985 - protein, 9 aa, Homo sapiens
VDVVYSQVW

SEQ ID NO: 9986 - protein, 9 aa, Homo sapiens
PDGYRRDLM

SEQ ID NO: 9987 - protein, 9 aa, Homo sapiens
EDVTLGNSS

SEQ ID NO: 9988 - protein, 9 aa, Homo sapiens
KESDAGKYY

SEQ ID NO: 9989 - protein, 9 aa, Homo sapiens
MEELQPVYV

SEQ ID NO: 9990 - protein, 9 aa, Homo sapiens
KVVNIPVRI

SEQ ID NO: 9991 - protein, 9 aa, Homo sapiens
MTAGVLWGL

SEQ ID NO: 9992 - protein, 9 aa, Homo sapiens
CSEAVPVSI

SEQ ID NO: 9993 - protein, 9 aa, Homo sapiens
SGGGASFNL

SEQ ID NO: 9994 - protein, 9 aa, Homo sapiens
EALRGSPPI

SEQ ID NO: 9995 - protein, 9 aa, Homo sapiens
AEHSGNYSC

SEQ ID NO: 9996 - protein, 9 aa, Homo sapiens
AAVGDLLEL

SEQ ID NO: 9997 - protein, 9 aa, Homo sapiens
LRGSPPILY

SEQ ID NO: 9998 - protein, 9 aa, Homo sapiens
YHEDVTLGN

SEQ ID NO: 9999 - protein, 9 aa, Homo sapiens
GPDGYRRDL

SEQ ID NO: 10000 - protein, 9 aa, Homo sapiens
GHVPIQSKV

SEQ ID NO: 10001 - protein, 9 aa, Homo sapiens
LHCEALRGS

SEQ ID NO: 10002 - protein, 9 aa, Homo sapiens
GFTGVALLL

SEQ ID NO: 10003 - protein, 9 aa, Homo sapiens
APSGGGASF

SEQ ID NO: 10004 - protein, 9 aa, Homo sapiens
LLELHCEAL

SEQ ID NO: 10005 - protein, 9 aa, Homo sapiens
MTAGVLWGL

SEQ ID NO: 10006 - protein, 9 aa, Homo sapiens
VLWGLFGVL

SEQ ID NO: 10007 - protein, 9 aa, Homo sapiens
YSCEANNGL

SEQ ID NO: 10008 - protein, 9 aa, Homo sapiens
SGGGASFNL

SEQ ID NO: 10009 - protein, 9 aa, Homo sapiens
SPTPDMEEL

SEQ ID NO: 10010 - protein, 9 aa, Homo sapiens
AAVGDLLEL

SEQ ID NO: 10011 - protein, 9 aa, Homo sapiens
QFYHEDVTL

SEQ ID NO: 10012 - protein, 9 aa, Homo sapiens
GAQAAVGDL

SEQ ID NO: 10013 - protein, 9 aa, Homo sapiens
TAGVLWGLF

SEQ ID NO: 10014 - protein, 9 aa, Homo sapiens
GVALLLYAL

SEQ ID NO: 10015 - protein, 9 aa, Homo sapiens
SSANIRTLL

SEQ ID NO: 10016 - protein, 9 aa, Homo sapiens
AQAAVGDLL

SEQ ID NO: 10017 - protein, 9 aa, Homo sapiens
GSPPILYQF

SEQ ID NO: 10018 - protein, 9 aa, Homo sapiens
GHVPIQSKV

SEQ ID NO: 10019 - protein, 9 aa, Homo sapiens
YHEDVTLGN

SEQ ID NO: 10020 - protein, 9 aa, Homo sapiens
RRDLMTAGV

SEQ ID NO: 10021 - protein, 9 aa, Homo sapiens
VRIPVSRPV

SEQ ID NO: 10022 - protein, 9 aa, Homo sapiens
AAVGDLLEL

SEQ ID NO: 10023 - protein, 9 aa, Homo sapiens
LGFTGVALL

SEQ ID NO: 10024 - protein, 9 aa, Homo sapiens
LHCEALRGS

SEQ ID NO: 10025 - protein, 9 aa, Homo sapiens
LLELHCEAL

SEQ ID NO: 10026 - protein, 9 aa, Homo sapiens
YSCEANNGL

SEQ ID NO: 10027 - protein, 9 aa, Homo sapiens
VLWGLFGVL

SEQ ID NO: 10028 - protein, 9 aa, Homo sapiens
SAELEIPAV

SEQ ID NO: 10029 - protein, 9 aa, Homo sapiens
GPDGYRRDL

SEQ ID NO: 10030 - protein, 9 aa, Homo sapiens
MTAGVLWGL

SEQ ID NO: 10031 - protein, 9 aa, Homo sapiens
GAQAAVGDL

SEQ ID NO: 10032 - protein, 9 aa, Homo sapiens
GVALLLYAL

SEQ ID NO: 10033 - protein, 9 aa, Homo sapiens
ESSANIRTL

SEQ ID NO: 10034 - protein, 9 aa, Homo sapiens
SPTPDMEEL

SEQ ID NO: 10035 - protein, 9 aa, Homo sapiens
DVDVVYSQV

SEQ ID NO: 10036 - protein, 9 aa, Homo sapiens
VVYSQVWSM

SEQ ID NO: 10037 - protein, 9 aa, Homo sapiens
QFYHEDVTL

SEQ ID NO: 10038 - protein, 9 aa, Homo sapiens
AQAAVGDLL

SEQ ID NO: 10039 - protein, 9 aa, Homo sapiens
TQRSLSAEL

SEQ ID NO: 10040 - protein, 9 aa, Homo sapiens
GGASFNLSL

SEQ ID NO: 10041 - protein, 9 aa, Homo sapiens
GVALLLYAL

SEQ ID NO: 10042 - protein, 9 aa, Homo sapiens
GPDGYRRDL

SEQ ID NO: 10043 - protein, 9 aa, Homo sapiens
MTAGVLWGL

SEQ ID NO: 10044 - protein, 9 aa, Homo sapiens
SSANIRTLL

SEQ ID NO: 10045 - protein, 9 aa, Homo sapiens
VLWGLFGVL

SEQ ID NO: 10046 - protein, 9 aa, Homo sapiens
GFTGVALLL

SEQ ID NO: 10047 - protein, 9 aa, Homo sapiens
LGFTGVALL

SEQ ID NO: 10048 - protein, 9 aa, Homo sapiens
RIPVSRPVL

SEQ ID NO: 10049 - protein, 9 aa, Homo sapiens
LLELHCEAL

SEQ ID NO: 10050 - protein, 9 aa, Homo sapiens
YSCEANNGL

SEQ ID NO: 10051 - protein, 9 aa, Homo sapiens
ESSANIRTL

SEQ ID NO: 10052 - protein, 9 aa, Homo sapiens
GAQAAVGDL

SEQ ID NO: 10053 - protein, 9 aa, Homo sapiens
SPTPDMEEL

SEQ ID NO: 10054 - protein, 9 aa, Homo sapiens
AAVGDLLEL

SEQ ID NO: 10055 - protein, 9 aa, Homo sapiens
QFYHEDVTL

SEQ ID NO: 10056 - protein, 9 aa, Homo sapiens
VLGFTGVAL

SEQ ID NO: 10057 - protein, 9 aa, Homo sapiens
SGGGASFNL

SEQ ID NO: 10058 - protein, 9 aa, Homo sapiens
KESDAGKYY

SEQ ID NO: 10059 - protein, 9 aa, Homo sapiens
LEIPAVKES

SEQ ID NO: 10060 - protein, 9 aa, Homo sapiens
SEAVPVSIS

SEQ ID NO: 10061 - protein, 9 aa, Homo sapiens
VSISGPDGY

SEQ ID NO: 10062 - protein, 9 aa, Homo sapiens
GSVDVDVVY

SEQ ID NO: 10063 - protein, 9 aa, Homo sapiens
SPPILYQFY

SEQ ID NO: 10064 - protein, 9 aa, Homo sapiens
RPNPQEFTY

SEQ ID NO: 10065 - protein, 9 aa, Homo sapiens
CEANNGLGA

SEQ ID NO: 10066 - protein, 9 aa, Homo sapiens
AEHSGNYSC

SEQ ID NO: 10067 - protein, 9 aa, Homo sapiens
EELQPVYVN

SEQ ID NO: 10068 - protein, 9 aa, Homo sapiens
FTGVALLLY

SEQ ID NO: 10069 - protein, 9 aa, Homo sapiens
WGLFGVLGF

SEQ ID NO: 10070 - protein, 9 aa, Homo sapiens
LTAEHSGNY

SEQ ID NO: 10071 - protein, 9 aa, Homo sapiens
HEDVTLGNS

SEQ ID NO: 10072 - protein, 9 aa, Homo sapiens
QEFTYSSPT

SEQ ID NO: 10073 - protein, 9 aa, Homo sapiens
LENKDSQVI

SEQ ID NO: 10074 - protein, 9 aa, Homo sapiens
ASRPNPQEF

SEQ ID NO: 10075 - protein, 9 aa, Homo sapiens
MEELQPVYV

SEQ ID NO: 10076 - protein, 9 aa, Homo sapiens
GSPPILYQF

SEQ ID NO: 10077 - protein, 9 aa, Homo sapiens
APSGGGASF

SEQ ID NO: 10078 - protein, 9 aa, Homo sapiens
EALRGSPPI

SEQ ID NO: 10079 - protein, 9 aa, Homo sapiens
GPDGYRRDL

SEQ ID NO: 10080 - protein, 9 aa, Homo sapiens
RADNGHVPI

SEQ ID NO: 10081 - protein, 9 aa, Homo sapiens
SPTPDMEEL

SEQ ID NO: 10082 - protein, 9 aa, Homo sapiens
SAELEIPAV

SEQ ID NO: 10083 - protein, 9 aa, Homo sapiens
AAVGDLLEL

SEQ ID NO: 10084 - protein, 9 aa, Homo sapiens
VGSVDVDVV

SEQ ID NO: 10085 - protein, 9 aa, Homo sapiens
FGVLGFTGV

SEQ ID NO: 10086 - protein, 9 aa, Homo sapiens
LGAQCSEAV

SEQ ID NO: 10087 - protein, 9 aa, Homo sapiens
LGFTGVALL

SEQ ID NO: 10088 - protein, 9 aa, Homo sapiens
GAQAAVGDL

SEQ ID NO: 10089 - protein, 9 aa, Homo sapiens
MGKKTQRSL

SEQ ID NO: 10090 - protein, 9 aa, Homo sapiens
SGGGASFNL

SEQ ID NO: 10091 - protein, 9 aa, Homo sapiens
GGASFNLSL

SEQ ID NO: 10092 - protein, 9 aa, Homo sapiens
IPAVKESDA

SEQ ID NO: 10093 - protein, 9 aa, Homo sapiens
EPRGASRPN

SEQ ID NO: 10094 - protein, 9 aa, Homo sapiens
IPVSRPVLT

SEQ ID NO: 10095 - protein, 9 aa, Homo sapiens
DAGKYYCRA

SEQ ID NO: 10096 - protein, 9 aa, Homo sapiens
LLYALFHKI

SEQ ID NO: 10097 - protein, 9 aa, Homo sapiens
DGYRRDLMT

SEQ ID NO: 10098 - protein, 9 aa, Homo sapiens
EALRGSPPI

SEQ ID NO: 10099 - protein, 9 aa, Homo sapiens
FGVLGFTGV

SEQ ID NO: 10100 - protein, 9 aa, Homo sapiens
AAVGDLLEL

SEQ ID NO: 10101 - protein, 9 aa, Homo sapiens
LGFTGVALL

SEQ ID NO: 10102 - protein, 9 aa, Homo sapiens
RADNGHVPI

SEQ ID NO: 10103 - protein, 9 aa, Homo sapiens
SPTPDMEEL

SEQ ID NO: 10104 - protein, 9 aa, Homo sapiens
GPDGYRRDL

SEQ ID NO: 10105 - protein, 9 aa, Homo sapiens
SAELEIPAV

SEQ ID NO: 10106 - protein, 9 aa, Homo sapiens
GAQAAVGDL

SEQ ID NO: 10107 - protein, 9 aa, Homo sapiens
LGAQCSEAV

SEQ ID NO: 10108 - protein, 9 aa, Homo sapiens
LLYALFHKI

SEQ ID NO: 10109 - protein, 9 aa, Homo sapiens
VGSVDVDVV

SEQ ID NO: 10110 - protein, 9 aa, Homo sapiens
IPVSRPVLT

SEQ ID NO: 10111 - protein, 9 aa, Homo sapiens
KVVNIPVRI

SEQ ID NO: 10112 - protein, 9 aa, Homo sapiens
SGGGASFNL

SEQ ID NO: 10113 - protein, 9 aa, Homo sapiens
GGASFNLSL

SEQ ID NO: 10114 - protein, 9 aa, Homo sapiens
QPVYVNVGS

SEQ ID NO: 10115 - protein, 9 aa, Homo sapiens
VPIQSKVVN

SEQ ID NO: 10116 - protein, 9 aa, Homo sapiens
MGKKTQRSL

SEQ ID NO: 10117 - protein, 9 aa, Homo sapiens
RSLSAELEI

SEQ ID NO: 10118 - protein, 9 aa, Homo sapiens
RADNGHVPI

SEQ ID NO: 10119 - protein, 9 aa, Homo sapiens
EALRGSPPI

SEQ ID NO: 10120 - protein, 9 aa, Homo sapiens
SAELEIPAV

SEQ ID NO: 10121 - protein, 9 aa, Homo sapiens
FGVLGFTGV

SEQ ID NO: 10122 - protein, 9 aa, Homo sapiens
VGSVDVDVV

SEQ ID NO: 10123 - protein, 9 aa, Homo sapiens
LGAQCSEAV

SEQ ID NO: 10124 - protein, 9 aa, Homo sapiens
GAQAAVGDL

SEQ ID NO: 10125 - protein, 9 aa, Homo sapiens
AAVGDLLEL

SEQ ID NO: 10126 - protein, 9 aa, Homo sapiens
LGFTGVALL

SEQ ID NO: 10127 - protein, 9 aa, Homo sapiens
DGYRRDLMT

SEQ ID NO: 10128 - protein, 9 aa, Homo sapiens
GPDGYRRDL

SEQ ID NO: 10129 - protein, 9 aa, Homo sapiens
SGGGASFNL

SEQ ID NO: 10130 - protein, 9 aa, Homo sapiens
MGKKTQRSL

SEQ ID NO: 10131 - protein, 9 aa, Homo sapiens
SPTPDMEEL

SEQ ID NO: 10132 - protein, 9 aa, Homo sapiens
GGASFNLSL

SEQ ID NO: 10133 - protein, 9 aa, Homo sapiens
LLYALFHKI

SEQ ID NO: 10134 - protein, 9 aa, Homo sapiens
DAGKYYCRA

SEQ ID NO: 10135 - protein, 9 aa, Homo sapiens
GASFNLSLT

SEQ ID NO: 10136 - protein, 9 aa, Homo sapiens
SATNEPRGA

SEQ ID NO: 10137 - protein, 9 aa, Homo sapiens
DVDVVYSQV

SEQ ID NO: 10138 - protein, 9 aa, Homo sapiens
VGSVDVDVV

SEQ ID NO: 10139 - protein, 9 aa, Homo sapiens
YQFYHEDVT

SEQ ID NO: 10140 - protein, 9 aa, Homo sapiens
VLWGLFGVL

SEQ ID NO: 10141 - protein, 9 aa, Homo sapiens
HVPIQSKVV

SEQ ID NO: 10142 - protein, 9 aa, Homo sapiens
QQPESSANI

SEQ ID NO: 10143 - protein, 9 aa, Homo sapiens
LENKDSQVI

SEQ ID NO: 10144 - protein, 9 aa, Homo sapiens
LLYALFHKI

SEQ ID NO: 10145 - protein, 9 aa, Homo sapiens
LGFTGVALL

SEQ ID NO: 10146 - protein, 9 aa, Homo sapiens
AQCSEAVPV

SEQ ID NO: 10147 - protein, 9 aa, Homo sapiens
LGAQCSEAV

SEQ ID NO: 10148 - protein, 9 aa, Homo sapiens
FGVLGFTGV

SEQ ID NO: 10149 - protein, 9 aa, Homo sapiens
SPPILYQFY

SEQ ID NO: 10150 - protein, 9 aa, Homo sapiens
WGLFGVLGF

SEQ ID NO: 10151 - protein, 9 aa, Homo sapiens
DGYRRDLMT

SEQ ID NO: 10152 - protein, 9 aa, Homo sapiens
VNIPVRIPV

SEQ ID NO: 10153 - protein, 9 aa, Homo sapiens
RDLMTAGVL

SEQ ID NO: 10154 - protein, 9 aa, Homo sapiens
DVDVVYSQV

SEQ ID NO: 10155 - protein, 9 aa, Homo sapiens
RIPVSRPVL

SEQ ID NO: 10156 - protein, 9 aa, Homo sapiens
AQAAVGDLL

SEQ ID NO: 10157 - protein, 9 aa, Homo sapiens
APSGGGASF

SEQ ID NO: 10158 - protein, 9 aa, Homo sapiens
GSPPILYQF

SEQ ID NO: 10159 - protein, 9 aa, Homo sapiens
ASRPNPQEF

SEQ ID NO: 10160 - protein, 9 aa, Homo sapiens
VALLLYALF

SEQ ID NO: 10161 - protein, 9 aa, Homo sapiens
TAGVLWGLF

SEQ ID NO: 10162 - protein, 9 aa, Homo sapiens
LTAEHSGNY

SEQ ID NO: 10163 - protein, 9 aa, Homo sapiens
GSVDVDVVY

SEQ ID NO: 10164 - protein, 9 aa, Homo sapiens
FTGVALLLY

SEQ ID NO: 10165 - protein, 9 aa, Homo sapiens
RSLSAELEI

SEQ ID NO: 10166 - protein, 9 aa, Homo sapiens
RSPGAQAAV

SEQ ID NO: 10167 - protein, 9 aa, Homo sapiens
VSISGPDGY

SEQ ID NO: 10168 - protein, 9 aa, Homo sapiens
LSAELEIPA

SEQ ID NO: 10169 - protein, 9 aa, Homo sapiens
YSCEANNGL

SEQ ID NO: 10170 - protein, 9 aa, Homo sapiens
SSAPSGGGA

SEQ ID NO: 10171 - protein, 9 aa, Homo sapiens
ASFNLSLTA

SEQ ID NO: 10172 - protein, 9 aa, Homo sapiens
MTAGVLWGL

SEQ ID NO: 10173 - protein, 9 aa, Homo sapiens
RADNGHVPI

SEQ ID NO: 10174 - protein, 9 aa, Homo sapiens
QSKVVNIPV

SEQ ID NO: 10175 - protein, 9 aa, Homo sapiens
SSANTRTLL

SEQ ID NO: 10176 - protein, 9 aa, Homo sapiens
CSEAVPVSI

SEQ ID NO: 10177 - protein, 9 aa, Homo sapiens
WGLFGVLGF

SEQ ID NO: 10178 - protein, 9 aa, Homo sapiens
VALLLYALF

SEQ ID NO: 10179 - protein, 9 aa, Homo sapiens
AAVGDLLEL

SEQ ID NO: 10180 - protein, 9 aa, Homo sapiens
LLYALFHKI

SEQ ID NO: 10181 - protein, 9 aa, Homo sapiens
RDLMTAGVL

SEQ ID NO: 10182 - protein, 9 aa, Homo sapiens
SPTPDMEEL

SEQ ID NO: 10183 - protein, 9 aa, Homo sapiens
EALRGSPPI

SEQ ID NO: 10184 - protein, 9 aa, Homo sapiens
QFYHEDVTL

SEQ ID NO: 10185 - protein, 9 aa, Homo sapiens
VRIPVSRPV

SEQ ID NO: 10186 - protein, 9 aa, Homo sapiens
VLWGLFGVL

SEQ ID NO: 10187 - protein, 9 aa, Homo sapiens
GHVPIQSKV

SEQ ID NO: 10188 - protein, 9 aa, Homo sapiens
LGFTGVALL

SEQ ID NO: 10189 - protein, 9 aa, Homo sapiens
KVVNIPVRI

SEQ ID NO: 10190 - protein, 9 aa, Homo sapiens
FGVLGFTGV

SEQ ID NO: 10191 - protein, 9 aa, Homo sapiens
VVYSQVWSM

SEQ ID NO: 10192 - protein, 9 aa, Homo sapiens
WGLFGVLGF

SEQ ID NO: 10193 - protein, 9 aa, Homo sapiens
GAQAAVGDL

SEQ ID NO: 10194 - protein, 9 aa, Homo sapiens
YSCEANNGL

SEQ ID NO: 10195 - protein, 9 aa, Homo sapiens
ESSANIRTL

SEQ ID NO: 10196 - protein, 9 aa, Homo sapiens
VNIPVRIPV

SEQ ID NO: 10197 - protein, 9 aa, Homo sapiens
GSPPILYQF

SEQ ID NO: 10198 - protein, 9 aa, Homo sapiens
QFYHEDVTL

SEQ ID NO: 10199 - protein, 9 aa, Homo sapiens
GFTGVALLL

SEQ ID NO: 10200 - protein, 9 aa, Homo sapiens
GPDGYRRDL

SEQ ID NO: 10201 - protein, 9 aa, Homo sapiens
SPTPDMEEL

SEQ ID NO: 10202 - protein, 9 aa, Homo sapiens
TYSSPTPDM

SEQ ID NO: 10203 - protein, 9 aa, Homo sapiens
APSGGGASF

SEQ ID NO: 10204 - protein, 9 aa, Homo sapiens
LYQFYHEDV

SEQ ID NO: 10205 - protein, 9 aa, Homo sapiens
RPNPQEFTY

SEQ ID NO: 10206 - protein, 9 aa, Homo sapiens
GYRRDLMTA

SEQ ID NO: 10207 - protein, 9 aa, Homo sapiens
SPPILYQFY

SEQ ID NO: 10208 - protein, 9 aa, Homo sapiens
LGFTGVALL

SEQ ID NO: 10209 - protein, 9 aa, Homo sapiens
GAQAAVGDL

SEQ ID NO: 10210 - protein, 9 aa, Homo sapiens
MTAGVLWGL

SEQ ID NO: 10211 - protein, 9 aa, Homo sapiens
GVALLLYAL

SEQ ID NO: 10212 - protein, 9 aa, Homo sapiens
AAVGDLLEL

SEQ ID NO: 10213 - protein, 9 aa, Homo sapiens
ESSANIRTL

SEQ ID NO: 10214 - protein, 9 aa, Homo sapiens
MGKKTQRSL

SEQ ID NO: 10215 - protein, 9 aa, Homo sapiens
YSCEANNGL

SEQ ID NO: 10216 - protein, 9 aa, Homo sapiens
GSPPILYQF

SEQ ID NO: 10217 - protein, 9 aa, Homo sapiens
VLGFTGVAL

SEQ ID NO: 10218 - protein, 9 aa, Homo sapiens
GVALLLYAL

SEQ ID NO: 10219 - protein, 9 aa, Homo sapiens
TQRSLSAEL

SEQ ID NO: 10220 - protein, 9 aa, Homo sapiens
SSANIRTLL

SEQ ID NO: 10221 - protein, 9 aa, Homo sapiens
VLWGLFGVL

SEQ ID NO: 10222 - protein, 9 aa, Homo sapiens
GGASFNLSL

SEQ ID NO: 10223 - protein, 9 aa, Homo sapiens
AAVGDLLEL

SEQ ID NO: 10224 - protein, 9 aa, Homo sapiens
ESSANIRTL

SEQ ID NO: 10225 - protein, 9 aa, Homo sapiens
GAQAAVGDL

SEQ ID NO: 10226 - protein, 9 aa, Homo sapiens
MTAGVLWGL

SEQ ID NO: 10227 - protein, 9 aa, Homo sapiens
LGFTGVALL

SEQ ID NO: 10228 - protein, 9 aa, Homo sapiens
SPPILYQFY

SEQ ID NO: 10229 - protein, 9 aa, Homo sapiens
RRDLMTAGV

SEQ ID NO: 10230 - protein, 9 aa, Homo sapiens
KVVNIPVRI

SEQ ID NO: 10231 - protein, 9 aa, Homo sapiens
DMEELQPVY

SEQ ID NO: 10232 - protein, 9 aa, Homo sapiens
LLYALFHKI

SEQ ID NO: 10233 - protein, 9 aa, Homo sapiens
GHVPIQSKV

SEQ ID NO: 10234 - protein, 9 aa, Homo sapiens
DSQVIYSSV

SEQ ID NO: 10235 - protein, 9 aa, Homo sapiens
GPDGYRRDL

SEQ ID NO: 10236 - protein, 9 aa, Homo sapiens
YSCEANNGL

SEQ ID NO: 10237 - protein, 9 aa, Homo sapiens
SPTPDMEEL

SEQ ID NO: 10238 - protein, 9 aa, Homo sapiens
SPPILYQFY

SEQ ID NO: 10239 - protein, 9 aa, Homo sapiens
RPNPQEFTY

SEQ ID NO: 10240 - protein, 9 aa, Homo sapiens
FTGVALLLY

SEQ ID NO: 10241 - protein, 9 aa, Homo sapiens
LRGSPPILY

SEQ ID NO: 10242 - protein, 9 aa, Homo sapiens
GSVDVDVVY

SEQ ID NO: 10243 - protein, 9 aa, Homo sapiens
GSPPILYQF

SEQ ID NO: 10244 - protein, 9 aa, Homo sapiens
DMEELQPVY

SEQ ID NO: 10245 - protein, 9 aa, Homo sapiens
LTAEHSGNY

SEQ ID NO: 10246 - protein, 9 aa, Homo sapiens
GVALLLYAL

SEQ ID NO: 10247 - protein, 9 aa, Homo sapiens
ENKDSQVIY

SEQ ID NO: 10248 - protein, 9 aa, Homo sapiens
KESDAGKYY

SEQ ID NO: 10249 - protein, 9 aa, Homo sapiens
MTAGVLWGL

SEQ ID NO: 10250 - protein, 9 aa, Homo sapiens
TAGVLWGLF

SEQ ID NO: 10251 - protein, 9 aa, Homo sapiens
VALLLYALF

SEQ ID NO: 10252 - protein, 9 aa, Homo sapiens
VSISGPDGY

SEQ ID NO: 10253 - protein, 9 aa, Homo sapiens
APSGGGASF

SEQ ID NO: 10254 - protein, 9 aa, Homo sapiens
SSANIRTLL

SEQ ID NO: 10255 - protein, 9 aa, Homo sapiens
GGASFNLSL

SEQ ID NO: 10256 - protein, 9 aa, Homo sapiens
LYALFHKIS

SEQ ID NO: 10257 - protein, 9 aa, Homo sapiens
AQAAVGDLL

SEQ ID NO: 10258 - protein, 9 aa, Homo sapiens
ESSANIRTL

SEQ ID NO: 10259 - protein, 9 aa, Homo sapiens
GASFNLSLT

SEQ ID NO: 10260 - protein, 9 aa, Homo sapiens
AAVGDLLEL

SEQ ID NO: 10261 - protein, 9 aa, Homo sapiens
CEANNGLGA

SEQ ID NO: 10262 - protein, 9 aa, Homo sapiens
RSLSAELEI

SEQ ID NO: 10263 - protein, 9 aa, Homo sapiens
EALRGSPPI

SEQ ID NO: 10264 - protein, 9 aa, Homo sapiens
QQPESSANI

SEQ ID NO: 10265 - protein, 9 aa, Homo sapiens
RIPVSRPVL

SEQ ID NO: 10266 - protein, 9 aa, Homo sapiens
KVVNIPVRI

SEQ ID NO: 10267 - protein, 9 aa, Homo sapiens
RDLMTAGVL

SEQ ID NO: 10268 - protein, 9 aa, Homo sapiens
SKVVNIPVR

SEQ ID NO: 10269 - protein, 9 aa, Homo sapiens
TLLENKDSQ

SEQ ID NO: 10270 - protein, 9 aa, Homo sapiens
VILGNSSAP

SEQ ID NO: 10271 - protein, 9 aa, Homo sapiens
YSCEANNGL

SEQ ID NO: 10272 - protein, 9 aa, Homo sapiens
SGGGASFNL

SEQ ID NO: 10273 - protein, 9 aa, Homo sapiens
SSANIRTLL

SEQ ID NO: 10274 - protein, 9 aa, Homo sapiens
VLWGLFGVL

SEQ ID NO: 10275 - protein, 9 aa, Homo sapiens
LGFTGVALL

SEQ ID NO: 10276 - protein, 9 aa, Homo sapiens
GAQAAVGDL

SEQ ID NO: 10277 - protein, 9 aa, Homo sapiens
GGASFNLSL

SEQ ID NO: 10278 - protein, 9 aa, Homo sapiens
SSANIRTLL

SEQ ID NO: 10279 - protein, 9 aa, Homo sapiens
ESSANIRTL

SEQ ID NO: 10280 - protein, 9 aa, Homo sapiens
AAVGDLLEL

SEQ ID NO: 10281 - protein, 9 aa, Homo sapiens
GASFNLSLT

SEQ ID NO: 10282 - protein, 9 aa, Homo sapiens
TLLENKDSQ

SEQ ID NO: 10283 - protein, 9 aa, Homo sapiens
RSLSAELEI

SEQ ID NO: 10284 - protein, 9 aa, Homo sapiens
AQAAVGDLL

SEQ ID NO: 10285 - protein, 9 aa, Homo sapiens
YSCEANNGL

SEQ ID NO: 10286 - protein, 9 aa, Homo sapiens
GVALLLYAL

SEQ ID NO: 10287 - protein, 9 aa, Homo sapiens
GAQAAVGDL

SEQ ID NO: 10288 - protein, 9 aa, Homo sapiens
SGGGASFNL

SEQ ID NO: 10289 - protein, 9 aa, Homo sapiens
TQRSLSAEL

SEQ ID NO: 10290 - protein, 9 aa, Homo sapiens
VVYSQVWSM

SEQ ID NO: 10291 - protein, 9 aa, Homo sapiens
ASRPNPQEF

SEQ ID NO: 10292 - protein, 9 aa, Homo sapiens
QQPESSANI

SEQ ID NO: 10293 - protein, 9 aa, Homo sapiens
PVYVNVGSV

SEQ ID NO: 10294 - protein, 9 aa, Homo sapiens
GGASFNLSL

SEQ ID NO: 10295 - protein, 9 aa, Homo sapiens
LGFTGVALL

SEQ ID NO: 10296 - protein, 9 aa, Homo sapiens
RIPVSRPVL

SEQ ID NO: 10297 - protein, 9 aa, Homo sapiens
KVVNIPVRI

SEQ ID NO: 10298 - protein, 9 aa, Homo sapiens
SGGGASFNL

SEQ ID NO: 10299 - protein, 9 aa, Homo sapiens
MGKKTQRSL

SEQ ID NO: 10300 - protein, 9 aa, Homo sapiens
GGASFNLSL

SEQ ID NO: 10301 - protein, 9 aa, Homo sapiens
LGFTGVALL

SEQ ID NO: 10302 - protein, 9 aa, Homo sapiens
QQPESSANI

SEQ ID NO: 10303 - protein, 9 aa, Homo sapiens
NIPVRIPVS

SEQ ID NO: 10304 - protein, 9 aa, Homo sapiens
LGAQCSEAV

SEQ ID NO: 10305 - protein, 9 aa, Homo sapiens
FGVLGFTGV

SEQ ID NO: 10306 - protein, 9 aa, Homo sapiens
VGSVDVDVV

SEQ ID NO: 10307 - protein, 9 aa, Homo sapiens
WGLFGVLGF

SEQ ID NO: 10308 - protein, 9 aa, Homo sapiens
HVPIQSKVV

SEQ ID NO: 10309 - protein, 9 aa, Homo sapiens
RIPVSRPVL

SEQ ID NO: 10310 - protein, 9 aa, Homo sapiens
DGYRRDLMT

SEQ ID NO: 10311 - protein, 9 aa, Homo sapiens
RSPGAQAAV

SEQ ID NO: 10312 - protein, 9 aa, Homo sapiens
GSPPILYQF

SEQ ID NO: 10313 - protein, 9 aa, Homo sapiens
SGPDGYRRD

SEQ ID NO: 10314 - protein, 9 aa, Homo sapiens
GAQAAVGDL

SEQ ID NO: 10315 - protein, 9 aa, Homo sapiens
SRPNPQEFT

SEQ ID NO: 10316 - protein, 9 aa, Homo sapiens
SGNYSCEAN

SEQ ID NO: 10317 - protein, 9 aa, Homo sapiens
SPPILYQFY

SEQ ID NO: 10318 - protein, 9 aa, Homo sapiens
LLYALFHKI

SEQ ID NO: 10319 - protein, 9 aa, Homo sapiens
VLWGLFGVL

SEQ ID NO: 10320 - protein, 9 aa, Homo sapiens
DSQVIYSSV

SEQ ID NO: 10321 - protein, 9 aa, Homo sapiens
ELQPVYVNV

SEQ ID NO: 10322 - protein, 9 aa, Homo sapiens
VVYSQVWSM

SEQ ID NO: 10323 - protein, 9 aa, Homo sapiens
LGFTGVALL

SEQ ID NO: 10324 - protein, 9 aa, Homo sapiens
GAQAAVGDL

SEQ ID NO: 10325 - protein, 9 aa, Homo sapiens
DAGKYYCRA

SEQ ID NO: 10326 - protein, 9 aa, Homo sapiens
SPPILYQFY

SEQ ID NO: 10327 - protein, 9 aa, Homo sapiens
TYSSPTPDM

SEQ ID NO: 10328 - protein, 9 aa, Homo sapiens
SGGGASFNL

SEQ ID NO: 10329 - protein, 9 aa, Homo sapiens
YSCEANNGL

SEQ ID NO: 10330 - protein, 9 aa, Homo sapiens
GGGASFNLS

SEQ ID NO: 10331 - protein, 9 aa, Homo sapiens
FGVLGFTGV

SEQ ID NO: 10332 - protein, 9 aa, Homo sapiens
GGASFNLSL

SEQ ID NO: 10333 - protein, 9 aa, Homo sapiens
QQPESSANI

SEQ ID NO: 10334 - protein, 9 aa, Homo sapiens
AAVGDLLEL

SEQ ID NO: 10335 - protein, 9 aa, Homo sapiens
SPTPDMEEL

SEQ ID NO: 10336 - protein, 9 aa, Homo sapiens
AQAAVGDLL

SEQ ID NO: 10337 - protein, 9 aa, Homo sapiens
RDLMTAGVL

SEQ ID NO: 10338 - protein, 9 aa, Homo sapiens
QFYHEDVTL

SEQ ID NO: 10339 - protein, 9 aa, Homo sapiens
GFTGVALLL

SEQ ID NO: 10340 - protein, 9 aa, Homo sapiens
LYQFYHEDV

SEQ ID NO: 10341 - protein, 9 aa, Homo sapiens
TYSSPTPDM

SEQ ID NO: 10342 - protein, 9 aa, Homo sapiens
KVVNIPVRI

SEQ ID NO: 10343 - protein, 9 aa, Homo sapiens
AAVGDLLEL

SEQ ID NO: 10344 - protein, 9 aa, Homo sapiens
EALRGSPPI

SEQ ID NO: 10345 - protein, 9 aa, Homo sapiens
RSLSAELEI

SEQ ID NO: 10346 - protein, 9 aa, Homo sapiens
AQAAVGDLL

SEQ ID NO: 10347 - protein, 9 aa, Homo sapiens
SSANIRTLL

SEQ ID NO: 10348 - protein, 9 aa, Homo sapiens
QQPESSANI

SEQ ID NO: 10349 - protein, 9 aa, Homo sapiens
LLYALFHKI

SEQ ID NO: 10350 - protein, 9 aa, Homo sapiens
GYRRDLMTA

SEQ ID NO: 10351 - protein, 9 aa, Homo sapiens
CSEAVPVSI

SEQ ID NO: 10352 - protein, 9 aa, Homo sapiens
SPTPDMEEL

SEQ ID NO: 10353 - protein, 9 aa, Homo sapiens
ALRGSPPIL

SEQ ID NO: 10354 - protein, 9 aa, Homo sapiens
RADNGHVPI

SEQ ID NO: 10355 - protein, 9 aa, Homo sapiens
YSCEANNGL

SEQ ID NO: 10356 - protein, 9 aa, Homo sapiens
VLWGLFGVL

SEQ ID NO: 10357 - protein, 9 aa, Homo sapiens
ESSANIRTL

SEQ ID NO: 10358 - protein, 9 aa, Homo sapiens
LENKDSQVI

SEQ ID NO: 10359 - protein, 9 aa, Homo sapiens
MEELQPVYV

SEQ ID NO: 10360 - protein, 9 aa, Homo sapiens
AEHSGNYSC

SEQ ID NO: 10361 - protein, 9 aa, Homo sapiens
EELQPVYVN

SEQ ID NO: 10362 - protein, 9 aa, Homo sapiens
EALRGSPPI

SEQ ID NO: 10363 - protein, 9 aa, Homo sapiens
QEFTYSSPT

SEQ ID NO: 10364 - protein, 9 aa, Homo sapiens
SEAVPVSIS

SEQ ID NO: 10365 - protein, 9 aa, Homo sapiens
LLYALFHKI

SEQ ID NO: 10366 - protein, 9 aa, Homo sapiens
CEANNGLGA

SEQ ID NO: 10367 - protein, 9 aa, Homo sapiens
HEDVTLGNS

SEQ ID NO: 10368 - protein, 9 aa, Homo sapiens
CSEAVPVSI

SEQ ID NO: 10369 - protein, 9 aa, Homo sapiens
LEIPAVKES

SEQ ID NO: 10370 - protein, 9 aa, Homo sapiens
EDVTLGNSS

SEQ ID NO: 10371 - protein, 9 aa, Homo sapiens
RSLSAELEI

SEQ ID NO: 10372 - protein, 9 aa, Homo sapiens
RADNGHVPI

SEQ ID NO: 10373 - protein, 9 aa, Homo sapiens
QQPESSANI

SEQ ID NO: 10374 - protein, 9 aa, Homo sapiens
KVVNIPVRI

SEQ ID NO: 10375 - protein, 9 aa, Homo sapiens
KESDAGKYY

SEQ ID NO: 10376 - protein, 9 aa, Homo sapiens
VDVVYSQVW

SEQ ID NO: 10377 - protein, 9 aa, Homo sapiens
LELHCEALR

SEQ ID NO: 10378 - protein, 9 aa, Homo sapiens
LENKDSQVI

SEQ ID NO: 10379 - protein, 9 aa, Homo sapiens
MEELQPVYV

SEQ ID NO: 10380 - protein, 9 aa, Homo sapiens
AEHSGNYSC

SEQ ID NO: 10381 - protein, 9 aa, Homo sapiens
EELQPVYVN

SEQ ID NO: 10382 - protein, 9 aa, Homo sapiens
EALRGSPPI

SEQ ID NO: 10383 - protein, 9 aa, Homo sapiens
QEFTYSSPT

SEQ ID NO: 10384 - protein, 9 aa, Homo sapiens
SEAVPVSIS

SEQ ID NO: 10385 - protein, 9 aa, Homo sapiens
LLYALFHKI

SEQ ID NO: 10386 - protein, 9 aa, Homo sapiens
CEANNGLGA

SEQ ID NO: 10387 - protein, 9 aa, Homo sapiens
HEDVTLGNS

SEQ ID NO: 10388 - protein, 9 aa, Homo sapiens
CSEAVPVSI

SEQ ID NO: 10389 - protein, 9 aa, Homo sapiens
LEIPAVKES

SEQ ID NO: 10390 - protein, 9 aa, Homo sapiens
EDVTLGNSS

SEQ ID NO: 10391 - protein, 9 aa, Homo sapiens
RSLSAELEI

SEQ ID NO: 10392 - protein, 9 aa, Homo sapiens
RADNGHVPI

SEQ ID NO: 10393 - protein, 9 aa, Homo sapiens
QQPESSANI

SEQ ID NO: 10394 - protein, 9 aa, Homo sapiens
KVVNIPVRI

SEQ ID NO: 10395 - protein, 9 aa, Homo sapiens
KESDAGKYY

SEQ ID NO: 10396 - protein, 9 aa, Homo sapiens
VDVVYSQVW

SEQ ID NO: 10397 - protein, 9 aa, Homo sapiens
LELHCEALR

SEQ ID NO: 10398 - protein, 9 aa, Homo sapiens
APSGGGASF

SEQ ID NO: 10399 - protein, 9 aa, Homo sapiens
SPTPDMEEL

SEQ ID NO: 10400 - protein, 9 aa, Homo sapiens
GSPPILYQF

SEQ ID NO: 10401 - protein, 9 aa, Homo sapiens
SPPILYQFY

SEQ ID NO: 10402 - protein, 9 aa, Homo sapiens
RPNPQEFTY

SEQ ID NO: 10403 - protein, 9 aa, Homo sapiens
NPQEFTYSS

SEQ ID NO: 10404 - protein, 9 aa, Homo sapiens
GPDGYRRDL

SEQ ID NO: 10405 - protein, 9 aa, Homo sapiens
IPVSRPVLT

SEQ ID NO: 10406 - protein, 9 aa, Homo sapiens
VPIQSKVVN

SEQ ID NO: 10407 - protein, 8 aa, Homo sapiens
PVYVNVGS

SEQ ID NO: 10408 - protein, 9 aa, Homo sapiens
IPAVKESDA

SEQ ID NO: 10409 - protein, 9 aa, Homo sapiens
SSANIRTLL

SEQ ID NO: 10410 - protein, 9 aa, Homo sapiens
ESSANIRTL

SEQ ID NO: 10411 - protein, 9 aa, Homo sapiens
YSCEANNGL

SEQ ID NO: 10412 - protein, 9 aa, Homo sapiens
DSQVIYSSV

SEQ ID NO: 10413 - protein, 9 aa, Homo sapiens
RSPGAQAAV

SEQ ID NO: 10414 - protein, 9 aa, Homo sapiens
ASRPNPQEF

SEQ ID NO: 10415 - protein, 9 aa, Homo sapiens
WGLFGVLGF

SEQ ID NO: 10416 - protein, 9 aa, Homo sapiens
VSISGPDGY

SEQ ID NO: 10417 - protein, 9 aa, Homo sapiens
TAGVLWGLF

SEQ ID NO: 10418 - protein, 9 aa, Homo sapiens
SKVVNIPVR

SEQ ID NO: 10419 - protein, 9 aa, Homo sapiens
VKESDAGKY

SEQ ID NO: 10420 - protein, 9 aa, Homo sapiens
NKDSQVIYS

SEQ ID NO: 10421 - protein, 9 aa, Homo sapiens
KKTQRSLSA

SEQ ID NO: 10422 - protein, 9 aa, Homo sapiens
HKISGESSA

SEQ ID NO: 10423 - protein, 9 aa, Homo sapiens
GKYYCRADN

SEQ ID NO: 10424 - protein, 9 aa, Homo sapiens
GKKTQRSLS

SEQ ID NO: 10425 - protein, 9 aa, Homo sapiens
TNEPRGASR

SEQ ID NO: 10426 - protein, 9 aa, Homo sapiens
ESSATNEPR

SEQ ID NO: 10427 - protein, 9 aa, Homo sapiens
VSRPVLTLR

SEQ ID NO: 10428 - protein, 9 aa, Homo sapiens
SISGPDGYR

SEQ ID NO: 10429 - protein, 9 aa, Homo sapiens
IPVRIPVSR

SEQ ID NO: 10430 - protein, 9 aa, Homo sapiens
ISGPDGYRR

SEQ ID NO: 10431 - protein, 9 aa, Homo sapiens
QPESSANIR

SEQ ID NO: 10432 - protein, 9 aa, Homo sapiens
LLLYALFHK

SEQ ID NO: 10433 - protein, 9 aa, Homo sapiens
DMEELQPVY

SEQ ID NO: 10434 - protein, 9 aa, Homo sapiens
SQVIYSSVK

SEQ ID NO: 10435 - protein, 9 aa, Homo sapiens
VLWGLFGVL

SEQ ID NO: 10436 - protein, 9 aa, Homo sapiens
VLGFTGVAL

SEQ ID NO: 10437 - protein, 9 aa, Homo sapiens
LLELHCEAL

SEQ ID NO: 10438 - protein, 30 aa, Homo sapiens
MGKKTQRSLSAELEIPAVKESDAGKYYCRA

SEQ ID NO: 10439 - protein, 30 aa, Homo sapiens
PAVKESDAGKYYCRADNGHVPIQSKVVNIP

SEQ ID NO: 10440 - protein, 30 aa, Homo sapiens
DNGHVPIQSKVVNIPVRIPVSRPVLTLRSP

SEQ ID NO: 10441 - protein, 30 aa, Homo sapiens
VRIPVSRPVLTLRSPGAQAAVGDLLELHCE

SEQ ID NO: 10442 - protein, 30 aa, Homo sapiens
GAQAAVGDLLELHCEALRGSPPILYQFYHE

SEQ ID NO: 10443 - protein, 30 aa, Homo sapiens
ALRGSPPILYQFYHEDVTLGNSSAPSGGGA

SEQ ID NO: 10444 - protein, 30 aa, Homo sapiens
DVTLGNSSAPSGGGASFNLSLTAEHSGNYS

SEQ ID NO: 10445 - protein, 30 aa, Homo sapiens
SFNLSLTAEHSGNYSCEANNGLGAQCSEAV

SEQ ID NO: 10446 - protein, 30 aa, Homo sapiens
CEANNGLGAQCSEAVPVSISGPDGYRRDLM

SEQ ID NO: 10447 - protein, 30 aa, Homo sapiens
PVSISGPDGYRRDLMTAGVLWGLFGVLGFT

SEQ ID NO: 10448 - protein, 30 aa, Homo sapiens
TAGVLWGLFGVLGFTGVALLLYALFHKISG

SEQ ID NO: 10449 - protein, 30 aa, Homo sapiens
GVALLLYALFHKISGESSATNEPRGASRPN

SEQ ID NO: 10450 - protein, 30 aa, Homo sapiens
ESSATNEPRGASRPNPQEFTYSSPTPDMEE

SEQ ID NO: 10451 - protein, 30 aa, Homo sapiens
PQEFTYSSPTPDMEELQPVYVNVGSVDVDV

SEQ ID NO: 10452 - protein, 30 aa, Homo sapiens
LQPVYVNVGSVDVDVVYSQVWSMQQPESSA

SEQ ID NO: 10453 - protein, 30 aa, Homo sapiens
VYSQVWSMQQPESSANIRTLLENKDSQVIY

SEQ ID NO: 10454 - protein, 21 aa, Homo sapiens
NIRTLLENKDSQVIYSSVKKS

SEQ ID NO: 10455 - protein, 39 aa, Homo sapiens
KVVNIPVRIPVSRPVLTLRSPGAQAAVGDLLELHCEALR

SEQ ID NO: 10456 - protein, 24 aa, Homo sapiens
LGAQCSEAVPVSISGPDGYRRDLM

SEQ ID NO: 10457 - protein, 16 aa, Homo sapiens
ELQPVYVNVGSVDVDV

SEQ ID NO: 10458 - protein, 38 aa, Homo sapiens
GPDGYRRDLMTAGVLWGLFGVLGFTGVALLLYALFHKI

SEQ ID NO: 10459 - protein, 515 aa, Homo sapiens
MLLWASLLAFAPVCGQSAAAHKPVISVHPPWTTFFKGERVTLTCNGFQFYATEKTTWYHRHYWGEKLTLTPGNTLEVRESGLYRCQARGSPRSNPVRLLFSSDSLILQAPYSVFEGDTLVLRCHRRRKEKLTAVKYTWNGNILSISNKSWDLLIPQASSNNNGNYRCIGYGDENDVFRSNFKIIKIQELFPHPELKATDSQPTEGNSVNLSCETQLPPERSDTPLHFNFFRDGEVILSDWSTYPELQLPTVWRENSGSYWCGAETVRGNIHKHSPSLQIHVQRIPVSGVLLETQPSGGQAVEGEMLVLVCSVAEGTGDTTFSWHREDMQESLGRKTQRSLRAELELPAIRQSHAGGYYCTADNSYGPVQSMVLNVTVRETPGNRDGLVAAGATGGLLSALLLAVALLFHCWRRRKSGVGFLGDETRLPPAPGPGESSHSICPAQVELQSLYVDVHPKKGDLVYSEIQTTQLGEEEEANTSRTLLEDKDVSVVYSEVKTQHPDNSAGKISSKDEES

SEQ ID NO: 10460 - protein, 759 aa, Homo sapiens
MLLWVILLVLAPVSGQFARTPRPIIFLQPPWTTVFQGERVTLTCKGFRFYSPQKTKWYHRYLGKEILRETPDNILEVQESGEYRCQAQGSPLSSPVHLDFSSASLILQAPLSVFEGDSVVLRCRAKAEVTLNNTIYKNDNVLAFLNKRTDFHIPHACLKDNGAYRCTGYKESCCPVSSNTVKIQVQEPFTRPVLRASSFQPISGNPVTLTCETQLSLERSDVPLRFRFFRDDQTLGLGWSLSPNFQITAMWSKDSGFYWCKAATMPHSVISDSPRSWIQVQIPASHPVLTLSPEKALNFEGTKVTLHCETQEDSLRTLYRFYHEGVPLRHKSVRCERGASISFSLTTENSGNYYCTADNGLGAKPSKAVSLSVTVPVSHPVLNLSSPEDLIFEGAKVTLHCEAQRGSLPILYQFHHEDAALERRSANSAGGVAISFSLTAEHSGNYYCTADNGFGPQRSKAVSLSITVPVSHPVLTLSSAEALTFEGATVTLHCEVQRGSPQILYQFYHEDMPLWSSSTPSVGRVSFSFSLTEGHSGNYYCTADNGFGPQRSEVVSLFVTVPVSRPILTLRVPRAQAVVGDLLELHCEAPRGSPPILYWFYHEDVTLGSSSAPSGGEASFNLSLTAEHSGNYSCEANNGLVAQHSDTISLSVIVPVSRPILTFRAPRAQAVVGDLLELHCEALRGSSPILYWFYHEDVTLGKISAPSGGGASFNLSLTTEHSGIYSCEADNGLEAQRSEMVTLKVAGEWALPTSSTSEN

SEQ ID NO: 10461 - protein, 592 aa, Homo sapiens
MLLWVILLVLAPVSGQFARTPRPIIFLQPPWTTVFQGERVTLTCKGFRFYSPQKTKWYHRYLGKEILRETPDNILEVQESGEYRCQAQGSPLSSPVHLDFSSASLILQAPLSVFEGDSVVLRCRAKAEVTLNNTIYKNDNVLAFLNKRTDFHIPHACLKDNGAYRCTGYKESCCPVSSNTVKIQVQEPFTRPVLRASSFQPISGNPVTLTCETQLSLERSDVPLRFRFFRDDQTLGLGWSLSPNFQITAMWSKDSGFYWCKAATMPHSVISDSPRSWIQVQIPASHPVLTLSPEKALNFEGTKVTLHCETQEDSLRTLYRFYHEGVPLRHKSVRCERGASISFSLTTENSGNYYCTADNGLGAKPSKAVSLSVTVPVSHPVLNLSSPEDLIFEGAKVTLHCEAQRGSLPILYQFHHEDAALERRSANSAGGVAISFSLTAEHSGNYYCTADNGFGPQRSKAVSLSITVPVSHPVLTLSSAEALTFEGATVTLHCEVQRGSPQILYQFYHEDMPLWSSSTPSVGRVSFSFSLTEGHSGNYYCTADNGFGPQRSEVVSLFVTGKCWVLASHPPLAEFSLTHSFKNLFALSSFLP

SEQ ID NO: 10462 - protein, 977 aa, Homo sapiens
MLLWVILLVLAPVSGQFARTPRPIIFLQPPWTTVFQGERVTLTCKGFRFYSPQKTKWYHRYLGKEILRETPDNILEVQESGEYRCQAQGSPLSSPVHLDFSSASLILQAPLSVFEGDSVVLRCRAKAEVTLNNTIYKNDNVLAFLNKRTDFHIPHACLKDNGAYRCTGYKESCCPVSSNTVKIQVQEPFTRPVLRASSFQPISGNPVTLTCETQLSLERSDVPLRFRFFRDDQTLGLGWSLSPNFQITAMWSKDSGFYWCKAATMPHSVISDSPRSWIQVQIPASHPVLTLSPEKALNFEGTKVTLHCETQEDSLRTLYRFYHEGVPLRHKSVRCERGASISFSLTTENSGNYYCTADNGLGAKPSKAVSLSVTVPVSHPVLNLSSPEDLIFEGAKVTLHCEAQRGSLPILYQFHHEDAALERRSANSAGGVAISFSLTAEHSGNYYCTADNGFGPQRSKAVSLSITVPVSHPVLTLSSAEALTFEGATVTLHCEVQRGSPQILYQFYHEDMPLWSSSTPSVGRVSFSFSLTEGHSGNYYCTADNGFGPQRSEVVSLFVTVPVSRPILTLRVPRAQAVVGDLLELHCEAPRGSPPILYWFYHEDVTLGSSSAPSGGEASFNLSLTAEHSGNYSCEANNGLVAQHSDTISLSVIVPVSRPILTFRAPRAQAVVGDLLELHCEALRGSSPILYWFYHEDVTLGKISAPSGGGASFNLSLTTEHSGIYSCEADNGLEAQRSEMVTLKVAVPVSRPVLTLRAPGTHAAVGDLLELHCEALRGSPLILYRFFHEDVTLGNRSSPSGGASLNLSLTAEHSGNYSCEADNGLGAQRSETVTLYITGLTANRSGPFATGVAGGLLSIAGLAAGALLLYCWLSRKAGRKPASDPARSPSDSDSQEPTYHNVPAWEELQPVYTNANPRGENVVYSEVRIIQEKKKHAVASDPRHLRNKGSPIIYSEVKVASTPVSGSLFLASSAPHR

SEQ ID NO: 10463 - protein, 734 aa, Homo sapiens
MLLWLLLLILTPGREQSGVAPKAVLLLNPPWSTAFKGEKVALICSSISHSLAQGDTYWYHDEKLLKIKHDKIQITEPGNYQCKTRGSSLSDAVHVEFSPDWLILQALHPVFEGDNVILRCQGKDNKNTHQKVYYKDGKQLPNSYNLEKITVNSVSRDNSKYHCTAYRKFYILDIEVTSKPLNIQVQELFLHPVLRASSSTPIEGSPMTLTCETQLSPQRPDVQLQFSLFRDSQTLGLGWSRSPRLQIPAMWTEDSGSYWCEVETVTHSIKKRSLRSQIRVQRVPVSNVNLEIRPTGGQLIEGENMVLICSVAQGSGTVTFSWHKEGRVRSLGRKTQRSLLAELHVLTVKESDAGRYYCAADNVHSPILSTWIRVTVRIPVSHPVLTFRAPRAHTVVGDLLELHCESLRGSPPILYRFYHEDVTLGNSSAPSGGGASFNLSLTAEHSGNYSCDADNGLGAQHSHGVSLRVTVPVSRPVLTLRAPGAQAVVGDLLELHCESLRGSFPILYWFYHEDDTLGNISAHSGGGASFNLSLTTEHSGNYSCEADNGLGAQHSKVVTLNVTGTSRNRTGLTAAGITGLVLSILVLAAAAALLHYARARRKPGGLSATGTSSHSPSECQEPSSSRPSRIDPQEPTHSKPLAPMELEPMYSNVNPGDSNPIYSQIWSIQHTKENSANCPMMHQEHEELTVLYSELKKTHPDDSAGEASSRGRAHEEDDEENYENVPRVLLASDH

SEQ ID NO: 10464 - protein, 508 aa, Homo sapiens
MLLWSLLVIFDAVTEQADSLTLVAPSSVFEGDSIVLKCQGEQNWKIQKMAYHKDNKELSVFKKFSDFLIQSAVLSDSGNYFCSTKGQLFLWDKTSNIVKIKVQELFQRPVLTASSFQPIEGGPVSLKCETRLSPQRLDVQLQFCFFRENQVLGSGWSSSPELQISAVWSEDTGSYWCKAETVTHRIRKQSLQSQIHVQRIPISNVSLEIRAPGGQVTEGQKLILLCSVAGGTGNVTFSWYREATGTSMGKKTQRSLSAELEIPAVKESDAGKYYCRADNGHVPIQSKVVNIPVRIPVSRPVLTLRSPGAQAAVGDLLELHCEALRGSPPILYQFYHEDVTLGNSSAPSGGGASFNLSLTAEHSGNYSCEANNGLGAQCSEAVPVSISGPDGYRRDLMTAGVLWGLFGVLGFTGVALLLYALFHKISGESSATNEPRGASRPNPQEFTYSSPTPDMEELQPVYVNVGSVDVDVVYSQVWSMQQPESSANIRTLLENKDSQVIYSSVKKS

SEQ ID NO: 10465 - protein, 429 aa, Homo sapiens
MLPRLLLLICAPLCEPAELFLIASPSHPTEGSPVTLTCKMPFLQSSDAQFQFCFFRDTRALGPGWSSSPKLQIAAMWKEDTGSYWCEAQTMASKVLRSRRSQINVHRVPVADVSLETQPPGGQVMEGDRLVLICSVAMGTGDITFLWYKGAVGLNLQSKTQRSLTAEYEIPSVRESDAEQYYCVAENGYGPSPSGLVSITVRIPVSRPILMLRAPRAQAAVEDVLELHCEALRGSPPILYWFYHEDITLGSRSAPSGGGASFNLSLTEEHSGNYSCEANNGLGAQRSEAVTLNFTVPTGARSNHLTSGVIEGLLSTLGPATVALLFCYGLKRKIGRRSARDPLRSLPSPLPQEFTYLNSPTPGQLQPIYENVNVVSGDEVYSLAYYNQPEQESVAAETLGTHMEDKVSLDIYSRLRKANITDVDYEDAM

SEQ ID NO: 10466 - protein, 266 aa, Homo sapiens
  variant (1)...(266): Xaa = Any amino acid
DNVHSPILSTWIRVTVRIPVSHPVLTFRAPRAHTVVGDLLELHCESLRGSPPILYRFYHEDVTLGNSSAPSGGGASFNLSLTAEHSGNYSCDADNGLGAQHSHGVSLRVTVPVSRPVLTLRAPGAQAVVGDPLELHCESLRGSFPILYWFYHEDDTLGNISAHSGGGASFNLSLTTEHSGNYSCEADNGLGAQHSKVVTLNVTGTSRNRTGLTXAGITGLVXXIXVLXAAAALLHYARARRKPGGLSATGTSSHSPSECQEPSSSR

SEQ ID NO: 10467 - protein, 8 aa, Artificial Sequence
  FLAG epitope tag
DYKDDDDK
